(19) United States
(12) Patent Application Publication
(10) Pub. No.: US 2024/0360442 A1
(43) Pub. Date: Oct. 31, 2024

(54) COMPOSITIONS AND METHODS FOR MODULATING GENE TRANSCRIPTION NETWORKS

(71) Applicant: Nuclear RNA Networks, Inc., Danville, CA (US)

(72) Inventor: Melanie Adams, Danville, CA (US)

(73) Assignee: Nuclear RNA Networks, Inc., Danville, CA (US)

(21) Appl. No.: 18/307,000

(22) Filed: Apr. 25, 2023

Related U.S. Application Data
(63) Continuation of application No. PCT/US22/17371, filed on Feb. 22, 2022.
(60) Provisional application No. 63/151,222, filed on Feb. 19, 2021.

(51) Int. Cl. C12N 15/113; G16B 30/10

(52) U.S. Cl. CPC C12N 15/113; G16B 30/10

(57) ABSTRACT

The invention involves the use of novel nucleic acid sequences to detect, modulate, ablate, inhibit or augment the transcription and therefore translation and expression of functionally-linked genes. The present disclosure is based on the novel finding that Transposable Element remnant (TEr) RNA or promoter non-processive transcripts (NPtx) have a high probability of aligning with high identity to transcriptional regulatory regions of functionally-linked genes, suggesting that they participate in beneficial transcriptional crosstalk.

### CROSS REFERENCE TO RELATED APPLICATIONS

[0001] This application claims priority to U.S. Provisional Patent Application No. 63/151,222, filed Feb. 19, 2021, which is hereby incorporated by reference. REFERENCE TO A “SEQUENCE LISTING,” A TABLE, OR A COMPUTER PROGRAM, LISTING APPENDIX SUBMITTED ON A COMPACT DISK

[0002] The instant application contains a Sequence Listing which has been submitted electronically in XML file format and is hereby incorporated by reference in its entirety. Said XML file, created on Aug. 10, 2023, is named 129443-5001-US Sequence Listing.xml and is 3.82 MB in size.

### BACKGROUND OF THE INVENTION

[0003] Transposable elements (TE, “jumping genes”) are now recognized as drivers of evolutionary innovation in gene transcription, both disrupting and dispersing transcription factor binding sites (TFBS) when they transpose. (Miller W J, McDonald J F, Pinsker W. Molecular domestication of mobile elements. Genetica. 1997; 100(1-3):261-70; Pehrsson E C, Choudhary M N K, Sundaram V, Wang T. The epigenomic landscape of transposable elements across normal human development and anatomy. Nature Communications. 2019; 10(1):5640; Lowe C B, Bejerano G, Haussler D. Thousands of human mobile element fragments undergo strong purifying selection near developmental genes. Proceedings of the National Academy of Sciences. 2007; Johnson R, Guigó R. The RIDL hypothesis: Transposable elements as functional domains of long noncoding RNAs. RNA. 2014; Bourque G, Leong B, Vega V B, Chen X, Lee Y L, Srinivasan K G, et al. Evolution of the mammalian transcription factor binding repertoire via transposable elements. Genome Res. 2008; 18(11):1752-62; Chuong E B, Elde N C, Feschotte C. Regulatory activities of transposable elements: From conflicts to benefits. 2017). However, the astonishing bulk of TE sequences in the human genome is thought to be accumulated residua; a functional role for the cell type-specific TE remnant (TEr) RNAs that are transcribed in all tissues and cell lines tested to date is mostly unknown. (Hall L L, Carone D M, Gomez A V, Kolpa H J, Byron M, Mehta N, et al. Stable C0T-1 repeat RNA is abundant and is associated with euchromatic interphase chromosomes. Cell. 2014; Camevali D, Conti A, Pellegrini M, Dieci G. Whole-genome expression analysis of mammalian-wide interspersed repeat elements in human cell lines. DNA research: an international journal for rapid publication of reports on genes and genomes. 2017; Xie M, Hong C, Zhang B, Lowdon R F, Xing X, Li D, et al. DNA hypomethylation within specific transposable element families associates with tissue-specific enhancer landscape. Nature Genetics. 2013; Johnson J M, Edwards S, Shoemaker D, Schadt E E. Dark matter in the genome: Evidence of widespread transcription detected by microarray tiling experiments. 2005; Chishima T, Iwakiri J, Hamada M. Identification of transposable elements contributing to tissue-specific expression of long non-coding RNAs. Genes. 2018.) Adding to their status as genomic “junk”, TE replication involves the duplication of DNA, or reverse transcription of TE RNA into complimentary DNA, and nucleotide substitution errors can occur or adjacent DNA or RNA sequences incorporated, resulting in the majority of TEs harboring sequence polymorphisms. (Malone C D, Hannon G J. Small RNAs as Guardians of the Genome. 2009; Villanueva-Cañas J L, Rech G E, de Cara M A R, González J. Beyond SNPs: how to detect selection on transposable element insertions. Methods in Ecology and Evolution. 2017; Umylny B, Presting G, Efird J T, Klimovitsky B I, Ward W S. Most human Alu and murine B1 repeats are unique. Journal of Cellular Biochemistry. 2007).

[0004] Uniquely tested by the inventor was the common assumption that the small sequence variation that allows determination of the genomic position of a repetitive element is physiologically irrelevant “junk”. Surprisingly, results suggest that protein-to-protein networks are mirrored by direct gene-to-gene networks between the genes that encode them, through the sharing of high identity “junk” DNA sequences. The unexpected specificity of this “junk” indicates its potential role in guidance of epigenetic chromatin-modifying complexes between functionally-linked genes by TEr-primed Argonautes and TEr-containing lncRNA. In addition, results suggest a new model of disease pathogenesis in which mis-regulation of TEr transcripts leads to aberrant guidance of transcription effector-complexes between the genes that share complementary partners, creating a transcription “network-opathy”. Results presented herein indicate that this may be the case in certain forms of Parkinson's disease. In vitro data confirms the predictive value of the methods disclosed herein in designing a molecule that is a powerful modulator of epithelial to mesenchymal transition.

[0005] The NPtx and TEr sequences have not otherwise been classified as miRNA, piRNA, siRNA, eRNA or other RNA of known function. Shared high-identity sequences ranged in length from 20 bp to hundreds of base pairs. They were sometimes transcribed in cell-type specific patterns into small RNA fragments unrelated to transposition. They were often found in lncRNA. Alignments were not pericentromeric and rarely in 3′UTR of coding-genes. All TE families and subtypes were represented in percentages consistent with their reported frequency in the human genome.

[0006] The invention includes nucleic acid sequences that are predicted to detect, modulate, ablate, inhibit or augment the transcription and therefore translation and expression of functionally-linked genes in phospholipid signaling-mediated cell activation, epithelial to mesenchymal transition, Parkinson's disease, myogenesis, stress-related fat metabolism and Tₕ-immune cell activation.

### SUMMARY

[0007] In an aspect, the present disclosure provides for the use of one or more Transposable Element remnant (TEr) nucleic acid sequences and promoter and promoter-proximal non-processive transcripts (NPtx) sequences of pathway hub genes and/or their associated (in cis or trans) lncRNA, to augment, alter, block or otherwise modify the transcription of genes that contain high identity (but not necessarily identical) nucleic acid sequences.

[0008] In another aspect, the present disclosure provides for a method to identify the DNA sequences of one or more Transposable Element remnant (TEr) nucleic acids and promoter and promoter-proximal non-processive transcripts (NPtx) of pathway hub genes.

[0009] In another aspect, the present disclosure provides for specific nucleic acid sequences that can be utilized to block, disrupt or augment one or more of the following pathways: 1) epithelial to mesenchymal transition, 2) phospholipid signaling pathway, 3) myogenesis, 4) Parkinson's Disease-associated pathways, 5) stress-mediated fat metabolism, 6) CD4+ T cell activation and HIV binding, wherein the nucleic acid sequences have sequence identifiers provided herein.

[0010] In another aspect, the present disclosure provides for nucleic acid sequences provided herein further modified by the addition of nuclear localization signals and/or “bar codes” and/or other nucleic acid identifiers and/or other synthetic modifiers.

[0011] In another aspect, the present disclosure provides for a composition comprising a nucleic acid sequences disclosed herein, and delivery molecule comprising viral vectors, nanoparticles or extracellular vesicles.

[0012] In another aspect, the present disclosure provides for a use of sequences provided herein as diagnostic or prognostic tool.

[0013] In another aspect, the present disclosure provides for a use of sequences provided herein to define a tumor or disease signature.

[0014] In another aspect, the present disclosure provides for the use of sequences provided herein for inhibition of epithelial to mesenchymal transition and/or maintaining tumor heterogeneity.

[0015] In another aspect, the present disclosure provides for the use of sequences provided herein for identification of cell function-specific pathways and/or for staging specific differentiation or developmental stages in cells, tissue and/or tissue samples.

[0016] In another aspect, the present disclosure provides for the use of sequences provided herein to trigger or modify stem cells to differentiate into a tissue and/or cell type-of-interest and/or inducing specific differentiation or developmental stages in cells, tissue and/or tissue samples.

[0017] In another aspect, the present disclosure provides for the use of TEr/NPtx-specific stands that are discovered by “pulled down” techniques, including but not restricted to Chromatin Immunoprecipitation for example, for the further identification of a specific genomic pathway or network.

[0018] In another aspect, the present disclosure provides for a synthetic nucleic acid comprising one or more of a transposon remnant, a promoter and/or a promoter-proximal non-processive transcript, selected to modulate gene-to-gene transcriptional signaling within a given functional pathway.

[0019] In another aspect, the present disclosure provides for a method of modulating epigenetic communication between genes coordinating specific pathways, comprising: delivering one or more synthetic nucleic acids as provided herein to a sample of cells and/or a tissue and/or an animal model of disease and/or a human clinical trial.

[0020] In another aspect, the present disclosure provides for a method of determining a network of genes, comprising the steps of:
[0021] (a) selecting a transposon remnant, a promoter, or a promoter-proximal non-processive transcript of a first index gene from a given functional pathway;
[0022] (b) identifying, using a computer implemented sequence alignment algorithm implemented by a processor, transposon remnant sequences from a set of genes, having at least 75% homology with the selected transposon remnant, promoter, or promoter-proximal non-processive transcript;
[0023] (c) determining, by the processor, a genomic position of the transposon remnant sequences with highest sequence identity with the selected transposon remnant, promoter, or promoter-proximal non-processive transcript;
[0024] (d) in response to a determination that the genomic position of a given identified transposon remnant sequence is within a gene regulatory region of a first gene among the set of genes, tabulating, by the processor, function of the first gene;
[0025] (e) repeating (a)-(d) for identified transposon remnant sequences that are in cis to the selected transposon remnant, promoter, or promoter-proximal non-processive transcript to determine transposon remnant sequences of genes connected to the first index gene; and
[0026] (f) repeating (a)-(e) with transposon remnant sequences of genes, among the set of genes, connected to the first index gene to determine a group of genes forming the given functional pathway.

[0027] In another aspect, the present disclosure provides for inducing specific differentiation or developmental stages in cells, comprising:
[0028] determining a group of genes forming a given functional pathway using any of the methods described herein;
[0029] delivering one or more synthetic nucleic acids comprising one or more of a transposon remnant, a promoter and/or a promoter-proximal non-processive transcript, and selected to modulate gene-to-gene transcriptional signaling within the given functional pathway,
[0030] wherein the given functional pathway is associated with the specific differentiation or developmental stages in cells.

### BRIEF DESCRIPTION OF THE DRAWINGS

[0031] FIG. 1. TE disperse highly specific variant sequences (“siblings”) to small groups of genes that are conserved within functionally-linked genes if they participate in transcriptional “crosstalk” that is evolutionarily beneficial. The ability of transposition to disperse small groups of high-identity TE variants (“siblings”) suggested the hypothesis that remnants of these siblings could participate in precise gene-to-gene transcriptional crosstalk based on shared nucleic acid sequences of high identity, unrelated to their transcription factor DNA binding sites or TE subtype-specific RNA secondary structure.

[0032] FIG. 2. TEr, NPtx and other “junk” non-processive RNA transcripts prime nuclear Argonaute/chromatin modifying complexes to DNA loci that are expressing complementary sequence.

[0033] FIG. 3. Exonic TEr guide lncRNA that scaffolds and chaperones transcription factors to DNA loci that are expressing complementary sequence.

[0034] FIG. 4A-4B. The model predicts neural-like networks will form between functionally-linked genes. 4a) each TEr is a small rate-limiting step to transcription of the full-length mRNA, a rate limiting step determined by the expression of its complementary sequence in trans; 4b) NFkB1/RELA TEr Network as an example of an Artificial Neural Network formed by TEr-mediated transcriptional crosstalk. The system is sensitive to shifts in 3D gene spacing and concentration of the TEr sequences, determined in turn by the transcription rate of their host gene. A threshold number of epigenetic modifications to TEr are required for processive (completed) transcription of any one gene. Genes can crosstalk at TEr “network nodes”, without necessarily leading to processive transcription of the full gene. Results suggest a new model of disease pathogenesis in which mis-regulation of TEr transcripts leads to aberrant guidance of transcription effector-complexes between the genes that share complementary partners, creating a transcription “network-opathy”.

[0035] FIG. 5. Evolutionary evidence that the model sheds light on a process whereby random distribution of TEr siblings could result in highly specific gene networks. The highly conserved MIR remnant within the FAK promoters of Human, xenopus and Murine species aligned to EMT-critical genes, but to different ones.

[0036] FIG. 6. The role of piRNA/PIWI in germ cells may be more than the silencing of transposing, and therefore mutagenic, transposons. TEr that have contributed to the evolution of multi-cellularity and tissue differentiation could also be placed “on hold” (quiescent) by piRNA-PIWI complexes, rather than terminally silenced, allowing their reactivation as necessary for embryogenesis and tissue-specific gene regulation.

[0037] FIG. 7. How Index TE are chosen. Example of Index TEr chosen within a conserved regulatory region of the NFkB1 enhancer.

[0038] FIG. 8. Flowchart of discovery algorithm using UCSC Genome Browser on Human December 2013 (GRCh38/hg38).

[0039] FIG. 9. Example of sequence alignment showing regions identified by BLAT2013 as high identity to NFkB1 AluJr_{Zebrafish} (position shown in FIG. 7, conserved to Zebrafish, ˜550 million yrs). NOTE: These aligned sequences are dispersed by TEr “siblings” (FIG. 1) and are termed “Core Template Sequences”.

[0040] FIG. 10. Summary of statistical analysis.

[0041] FIG. 11. Graphic representation of the statistically significant alignment results for Index TEr of the muscle/cardiovascular system. Significant fractions of mm/CVS index TE BLAT₂₀₁₃ top ten alignments were to other genes with Muscle/Cardiovascular Function, as compared to IS index TE (P<0.008 t test) or DEV index TE (P<0.008).

[0042] FIG. 12. Phospholipid Signaling Pathway genes aligned by NFkB1 and lncRNA_{LOC105377621/RP11-499E18.1} TEr sequences. The ancient Phospholipid Signaling Pathway is initiated by inflammatory and proliferative signals that activate cell membrane phospholipids, triggering immediate intracellular release of Ca²⁺ and the phosphorylation of effector proteins that activate NFkB1 (outlined in FIG. 15). Multiple genes encoding isoforms of key proteins critical to the initiation of phospholipid signaling were aligned by NFkB TEr including PI3-Kinase (PI3K-C2A), Phospholipase A (PLA2G4A) and Phospholipase C (PLC-E1). TEr with high identity to genes of this pathway were present throughout KFkB1 transcriptional regulatory regions including its upstream lncRNA_{LOC105377621/RP11-499E18.1} (highlighted by *). PLC-E1 was aligned by two different Alu Repeats in the promoter-proximal region of NFkB1 intron 1: AluYa5 and AluSz6_{chr4:102507477-102507601} (which also aligned KSR2, see below). Index TEr aligned to three genes encoding enzyme isoforms responsible for Phosphatidic Acid (PA) metabolism to DAG (Diacylglycerol Kinase Iota, Kappa and Eta; DGKI, DGKK and DGKH; and aligned another gene of this same pathway twice: TAMM41 (Mitochondrial Translocator Assembly and Maintenance Homolog; catalyzes the reaction of PA to CDP-diacylglycerol (CDP-DAG).

[0043] FIG. 13. Examples of TEr of NFkB1 and cis lncRNA_{LOC105377621/RP11-499E18.1} that align genes that define specific cellular pathways: genes of the Phospholipid Signaling Pathway (pink), genes of the RAS signaling pathway (red) and genes of epithelial to mesenchymal transition (green).

[0044] FIG. 14. NFkB1 has five NFkB1 TEr sequences that align with high identity to four genes encoding RAS inhibitors (KSR2 is aligned twice). TEr that align to KSR2 and NF-1 are adjacent to each other on NFkB1 intron 1 and are both “hub” regulators of the Ras signal transduction pathway.

[0045] FIG. 15. The network of functionally-linked genes is extended into same phospholipid signaling pathway by NFkB1/KSR2 “sibling” AluSz TEr alignments. Interestingly, the sibling AluSz in KSR2 also aligns to with high-identity to PRR5 (Proline Rich 5; hormone sensitive mTORC2 subunit, modulates PKC-Alpha). The original NFkB1 AluSz is adjacent to a TEr that aligned “PRR5-Like”. It is highly unlikely that these results would occur randomly. A brief outline of the Phospholipid Signaling Pathway is also shown. Proteins highlighted in red circles have isoforms aligned by NFkB1 TEr and their siblings.

[0046] FIG. 16. Adjacent promoter-proximal TEr in NFkB1 intron 1 align to genes critical to the initiation of EMT at the plasma membrane: LTBP1 (Latent-Transforming Growth Factor Beta-Binding Protein 1), LGR5 (Leucine-Rich Repeat-Containing G-Protein Coupled Receptor 5), LRP5L (Low Density Lipoprotein Receptor-Related Protein 5-Like), CTNNA3 (Catenin (Cadherin-Associated Protein), Alpha 3). LTBP1 is aligned twice: by TEr of NFkB1intron 1 and lncRNA_{Loco5377621/RP11-499E18.1}. Both NFkB1 and lncRNA_{LOC105377621/RP11-499E18.1} TEr align an isoform of FNBP1, critical to the formation of Adherens Junctions and cell-to-cell adhesion. GPC5 and 6 are surface heparan sulfate proteoglycans; GPC5 enhances migration and invasion of cancer cells through WNT5A signaling and among GPC6 related pathways is phospholipase-C.

[0047] FIG. 17: Tissue expression of NFkB1 and lncRNA_{LOC105377621/RP11-499E18.1} (isoforms termed LOC105377621 by UCSC are here termed LOC621“a” and RP11-499E18.1 is here termed LOC621“b-c”) and genes repeatedly aligned by both. Tissue expression is high in brain, lung and cultured fibroblasts (ENCODE₂₀₁₃ RNAseq). Definition of aligned proteins is presented in Table 8.

[0048] FIG. 18: RNAseq analysis of NFkB1 and lncRNA_{LOC105377621/RP11-499E18.1} in pancreatic adenocarcinoma cell lines (GSE88759). NFkB1 and lncRNA_{LOC105377621/RP11-499E18.1} were expressed in a well differentiated (epithelial) pancreatic cancer cell line (BxPC3) and silenced in a poorly differentiated (mesenchymal) cell line (S2-007/Suit2) suggesting their loss is associated with tumor progression. Red circle highlights expressed regions of lncRNA_{LOC105377621} and blue circles highlight expressed regions of NFkB1 intron 1.

[0049] FIG. 19. RP11-499E18.1 isoforms contain exonic TEr. The predominant isoforms (LOC621c) initiate with an AluY, which is usually spliced to a fragment of an AluSc. All isoforms terminate with MTL1J.

[0050] FIG. 20. SiRNA-mediated knock down (KD) designed for RP11-499E18.1 resulted in progression of the well differentiated human pancreatic adenocarcinoma cell line BxPC3 from epithelial to mesenchymal phenotype

[0051] FIG. 21. SiRNA-mediated KD of RP11-499E18.1 in human metastasizing pancreatic adenocarcinoma Suit2 cells resulted in transition of mixed population of both adherent spindling cells and poorly-differentiated small round cells into predominantly small round cells with no apparent contact-inhibition

[0052] FIG. 22. SiRNA-mediated knock down of RP11-499E18.1 in human metastasizing pancreatic adenocarcinoma COL0357 cells resulted in transition of the nested epithelioid cells into erratic small nests of small cells which, when stimulated with TGFb, enlarged and lost all signs of cell-to-cell contact. While responding to TGFb, the cells look nothing like the TGFb-stimulated mesenchymal/spindling cells of the control

[0053] FIG. 23. Highly expressed in muscle myoblasts, MyoD1 TEr and its upstream lncRNA_{RP11-358H18.3} have a high likelihood of aligning muscle-specific genes. Results unlikely to be random included MyoD1 TEr alignments to RYR2 (aligned twice, by different TEr) and RYR3 (ryanodine receptor 2, 3; calcium channels required specifically for muscle cell contraction: cardiac (isoform 2) and skeletal (isoform 3); highlighted in red). MN1 transcriptional regulator (ubiquitously expressed; highest median expression in Muscle-Skeletal) was also aligned twice, as was C10orf71 (Open Reading Frame70; unknown function, highly expressed solely in skeletal muscle). Similar to TEr of coding gene NFkB1 and its cis lncRNA_{LOC105377621/RP11-499E18.1} (both of which aligned EMT pathway-specific genes), MyoD1 upstream cis lncRNA_{LOC102723330/RP11-358H18.3} contained TEr that aligned to critical genes of myogenesis (highlighted in blue). For example, exon 2 MIRc (conserved to Xenopus) aligned with high identity to CDON1 (Cell Adhesion Associated, Oncogene Regulated 1; mediates cell-cell interactions between muscle precursor cells and positively regulates myogenesis) and Vasoactive Intestinal Peptide (VIP; stimulates myocardial contractility and causes vasodilation. Extended MyoD1 3′ UTR loci not otherwise notated as lncRNA consisted of highly transcribed TEr. Genes essential to myogenesis were aligned by these TEr as well. LncRNA_{LINCO2729} is expressed in testes only.

[0054] FIG. 24. The L2b initiating transcription from Steroid Receptor RNA Activator 1 (SRA1) has a high likelihood of aligning genes associated with Parkinson's Disease.

[0055] FIG. 25. Location of non-processive “junk” transcripts (NPtx) and lncRNA AF213884.3 within NFkB1 promoter that share high-identity TEr with genes participating in formation, processing, packaging and function of mRNA (Table 10).

[0056] FIG. 26. Summary of EMT initiation by Wnt, b-Catenin and FAK/PTK2 signaling.

[0057] FIG. 27. Genes participating in the Epithelial to Mesenchymal Transition that aligned with high sequence identity to b-Catenin promoter TEr sequence.

[0058] FIG. 28. Genes participating in the Epithelial to Mesenchymal Transition that aligned with high sequence identity to Wnt10B/1 shared promoter TEr sequence.

[0059] FIG. 29. Flowchart highlighting EMT pathway genes aligned by promoter TEr of FAK, b-Catenin, Wnt10B,1 and Wnt2.

[0060] FIG. 30. Intron 1 MER21C of CRHR2 aligns an endocrine-mediated gene network that participates in lipid metabolism. The STRING database (protein:protein interactions) highlights the finding of pathway-specific proteins discovered by TEr sequence genomic alignments.

[0061] FIG. 31. Graphical Abstract: results suggest that protein-to-protein networks are mirrored by direct gene-to-gene networks between the genes that encode them through the sharing of high identity “junk” DNA sequences. Given ancient mechanisms by which nucleic acid complementarity (RNA-mediated epigenetic mechanisms which allow precision in RNA/DNA-mediated signaling and targeting of proteins) our results suggest complex gene-to-gene communication networks can be identified, traced and therapeutically modified using the “junk” sequences that have been duplicated and dispersed by transposons for millennia.

[0062] FIG. 32A-32IIII. Sequences for TE templates for various index genes and corresponding portions of sequences having high identity with an aligned gene.
[0063] SEQ ID NOS: 1-7 are TE template sequences for NFkB1 template L1PB1 range=chr4:102464307-102464661.
[0064] SEQ ID NOS:8-19 are TE template sequences for NFkB1 template L1M6 range=chr4:102464705-102465277.
[0065] SEQ ID NOS:20-23 are TE template sequences for NFkB1 template AluJr range=chr4:102465811-102465981.
[0066] SEQ ID NOS:23-26 are TE template sequences for NFkB1 template AluJr ange=chr4:102466015-102466135.
[0067] SEQ ID NOS:27-49 are TE template sequences for NFkB1 template L1PB1 range=chr4:102459784-102460950.
[0068] SEQ ID NOS:50-76 are TE template sequences for NFkB1 template L1PB1 range=chr4:102458176-102459486.
[0069] SEQ ID NOS:77-81 are TE template sequences for NFkB1 template L1PBa1 range=chr4:102460951-102461180.
[0070] SEQ ID NOS:82-90 are TE template sequences for NFkB1 template MSTC range=chr4:102456262-102456665.
[0071] SEQ ID NOS:91-94 are TE template sequences for NFkB1 template MLT1K range=chr4:102457054-102457327.
[0072] SEQ ID NOS:95-100 are TE template sequences for NFkB1 template AluSq2 range=chr4:102459487-102459783.
[0073] SEQ ID NOS:101-104 are TE template sequences for NFkB1 template L1M6 range=chr4:102457972-102458156.
[0074] SEQ ID NOS: 105-113 are TE template sequences for NFkB1 template LTR16A2 range=chr4:102457329-102457742.
[0075] SEQ ID NOS:114-117 are TE template sequences for NFkB1 template MamGypLTR1c range=chr4:102456686-102456865.
[0076] SEQ ID NOS: 118-119 are TE template sequences for NFkB1 template LTR81B range=chr4:102454134-102454208.
[0077] SEQ ID NOS: 120-123 are TE template sequences for NFkB1 template LTR81B range=chr4:102453693-102453809.
[0078] SEQ ID NOS:124-126 are TE template sequences for NFkB1 template FLAM_A range=chr4:102469163-102469262.
[0079] SEQ ID NOS: 127-131 are TE template sequences for NFkB1 template MIRb range=chr4:102469431-102469661.
[0080] SEQ ID NOS:132-139 are TE template sequences for NFkB1 template MLT1A0 range=chr4:102468399-102468755.
[0081] SEQ ID NOS: 140-160 are TE template sequences for NFkB1 template L1MD1 range=chr4:102470492-102471503.
[0082] SEQ ID NOS: 161-162 are TE template sequences for NFkB1 template MIR3 range=chr4:102452674-102452739.
[0083] SEQ ID NOS:163-165 are TE template sequences for NFkB1 template MamRTE1 range=chr4:102451994-102452097.
[0084] SEQ ID NOS: 166-167 are TE template sequences for NFkB1 template L1M6 range=chr4:102469266-102469330.
[0085] SEQ ID NOS:168-199 are TE template sequences for NFkB1 template MLT1A0-int range=chr4:102466803-102468398.
[0086] SEQ ID NOS:200-205 are TE template sequences for NFkB1 template A1uSx1 range=chr4:102499715-102499995.
[0087] SEQ ID NOS:206-215 are TE template sequences for NFkB1 template MLT1C range=chr4:102498997-102499448.
[0088] SEQ ID NOS:216-224 are TE template sequences for NFkB1 template MSTB1 range=chr4:102498326-102498742.
[0089] SEQ ID NOS:225-228 are TE template sequences for NFkB1 template MIR range=chr4:102497855-102498045.
[0090] SEQ ID NOS:229-238 are TE template sequences for NFkB1 template L2 range=chr4:102497231-102497825.
[0091] SEQ ID NOS:239-246 are TE template sequences for NFkB1 template MLT1B range=chr4:102496240-102496617.
[0092] SEQ ID NOS:247-249 are TE template sequences for NFkB1 template MER81 range=chr4:102496090-102496191.
[0093] SEQ ID NOS:250-256 are TE template sequences for NFkB1 template L1MEj range=chr4:102493931-102494278.
[0094] SEQ ID NOS:257-313 are TE template sequences for NFkB1 template L1PB1 range=chr4:102485859-102488680.
[0095] SEQ ID NOS:314-336 are TE template sequences for NFkB1 template L1PA6 range=chr4:102484657-102485768.
[0096] SEQ ID NOS:337-371 are TE template sequences for NFkB1 template LTR12C range=chr4:102482956-102484656.
[0097] SEQ ID NOS:372-472 are TE template sequences for NFkB1 template L1PA6 range=chr4:102477934-102482955.
[0098] SEQ ID NOS:473-475 are TE template sequences for NFkB1 template L1PA6 range=chr4:103619161-103619277.
[0099] SEQ ID NOS:476-477 are TE template sequences for NFkB1 template L2a range=chr4:102505799-102505857.
[0100] SEQ ID NOS:478-480 are TE template sequences for NFkB1 template A1uSz6 range=chr4:102507477-102507601.
[0101] SEQ ID NOS:481-485 are TE template sequences for NFkB1 template HAL1ME range=chr4:102510807-102511027.
[0102] SEQ ID NOS:486-488 are TE template sequences for NFkB1 template L1MA9 range=chr4:102511116-102511227.
[0103] SEQ ID NOS:489-491 are TE template sequences for NFkB1 template L2a range=chr4:102511254-102511361.
[0104] SEQ ID NOS:492-498 are TE template sequences for NFkB1 template A1uJo range=chr4:102511394-102511703.
[0105] SEQ ID NOS:499-502 are TE template sequences for NFkB1 template L1MAB range=chr4:102511709-102511897.
[0106] SEQ ID NOS:503-509 are TE template sequences for NFkB1 template AluJr range=chr4:102512340-102512644.
[0107] SEQ ID NOS:510-515 are TE template sequences for NFkB1 template AluY range=chr4:102513892-102514190.
[0108] SEQ ID NOS:516-521 are TE template sequences for NFkB1 template AluYa5 range=chr4:102515108-102515409.
[0109] SEQ ID NOS:522-525 are TE template sequences for NFkB1 promoter non-processive transcripts range=chr4:102499993-102500159.
[0110] SEQ ID NOS:526-533 are portions of template sequences for NFkB1 template L1PB1 range=chr4:102464307-102464661 having a high identity with MCC (ENST00000408903.6) gene.
[0111] SEQ ID NOS:534-541 are portions of template sequences for NFkB1 template L1PB1 range=chr4:102464307-102464661 having a high identity with HECW2 (ENST00000260983.8) gene.
[0112] SEQ ID NOS:542-549 are portions of template sequences for NFkB1 template L1PB1 range=chr4:102464307-102464661 having a high identity with CD2AP (ENST00000359314.5) gene.
[0113] SEQ ID NOS:550-557 are portions of template sequences for NFkB1 template L1PB1 range=chr4:102464307-102464661 having a high identity with AFF2 (ENST00000370460.6) gene.
[0114] SEQ ID NOS:558-565 are portions of template sequences for NFkB1 template L1PB1 range=chr4:102464307-102464661 having a high identity with KLHDC2 (ENST00000298307.9) gene.
[0115] SEQ ID NOS:566-573 are portions of template sequences for NFkB1 template LlPB1 range=chr4:102464307-102464661 having a high identity with RORB (ENST00000376896.7) gene.
[0116] SEQ ID NO:574 is a portion of template sequence for NFkB1 template L1PB1 range=chr4:102464307-102464661 having a high identity with CTNNBIP1 (ENST00000377263.6) gene.
[0117] SEQ ID NO:575 is a portion of template sequence for NFkB1 template L1PB1 range=chr4:102464307-102464661 having a high identity with ELOA-AS1 (ENST00000655402.1) gene.
[0118] SEQ ID NO:576 is a portion of template sequence for NFkB1 template L1PB1 range=chr4:102464307-102464661 having a high identity with SSX2IP (ENST00000342203.7) gene.
[0119] SEQ ID NO:577 is a portion of template sequence for NFkB1 template L1M6 range=chr4:102464705-102465277 having a high identity with ANXA7 (ENST00000372921.9) gene.
[0120] SEQ ID NO:578 is a portion of template sequence for NFkB1 template L1M6 range=chr4:102464705-102465277 having a high identity with PLA2G4A (ENST00000367466.3) gene.
[0121] SEQ ID NO:579-582 are portions of template sequence for NFkB1 template AluJr range=chr4:102465811-102465981 having a high identity with TMIGD1 (ENST00000538566.6) gene.
[0122] SEQ ID NO:583-585 are portions of template sequence for NFkB1 template AluJr range=chr4:102465811-102465981 having a high identity with RNF111 (ENST00000348370.8) gene.
[0123] SEQ ID NO:586-593 are portions of template sequence for NFkB1 template AluJr range=chr4:102465811-102465981 having a high identity with SMG1P2 (NR_135305.1) gene.
[0124] SEQ ID NO:594-596 are portions of template sequence for NFkB1 template AluJr range=chr4:102466015-102466135 having a high identity with PIK3C2A (RefSeq: NM_001321378.1) gene.
[0125] SEQ ID NO:597-599 are portions of template sequence for NFkB1 template AluJr range=chr4:102466015-102466135 having a high identity with FNBP1L (ENST00000260506.12) gene.
[0126] SEQ ID NO:600-602 are portions of template sequence for NFkB1 template AluJr range=chr4:102466015-102466135 having a high identity with PHF11 (ENST00000378319.7) gene.
[0127] SEQ ID NO:603-626 are portions of template sequence for NFkB1 template L1PB1 range=chr4:102459784-102460950 having a high identity with KCNH1 (ENST00000367007.5) gene.
[0128] SEQ ID NO:627-650 are portions of template sequence for NFkB1 template L1PB1 range=chr4:102459784-102460950 having a high identity with CA3-AS1 (ENST00000517697.5) gene.
[0129] SEQ ID NO:651-676 are portions of template sequence for NFkB1 template LiPB1 range=chr4:102458176-102459486 having a high identity with CA3-AS1 (ENST00000517697.5) gene.
[0130] SEQ ID NO:677-702 are portions of template sequence for NFkB1 template L1PB1 range=chr4:102458176-102459486 having a high identity with PDE7A (ENST00000401827.7) gene.
[0131] SEQ ID NO:703-728 are portions of template sequence for NFkB1 template L1PB1 range=chr4:102458176-102459486 having a high identity with MUSK (ENST00000374448.8) gene.
[0132] SEQ ID NO:729-755 are portions of template sequence for NFkB1 template L1PB1 range=chr4:102458176-102459486 having a high identity with DGKI (ENST00000453654.6) gene.
[0133] SEQ ID NO:756-760 are portions of template sequence for NFkB1 template L1PBa1 range=chr4:102460951-102461180 having a high identity with DGKK (ENST00000611977.1) gene.
[0134] SEQ ID NO:761-765 are portions of template sequence for NFkB1 template L1PBa1 range=chr4:102460951-102461180 having a high identity with DDX11-AS1 (ENST00000500527.1) gene.
[0135] SEQ ID NO:766-774 are portions of template sequence for NFkB1 template MSTC range=chr4:102456262-102456665 having a high identity with POLR3E (ENST00000615879.4) gene.
[0136] SEQ ID NO:775-776 are portions of template sequence for NFkB1 template MSTC range=chr4:102456262-102456665 having a high identity with AP002992.1 (ENST00000530842.2) gene.
[0137] SEQ ID NO:777-782 are portions of template sequence for NFkB1 template AluSq2 range=chr4:102459487-102459783 having a high identity with MED11 (ENST00000575284.5) gene.
[0138] SEQ ID NO:783-788 are portions of template sequence for NFkB1 template AluSq2 range=chr4:102459487-102459783 having a high identity with SCAI (ENST00000336505.10) gene.
[0139] SEQ ID NO:789-794 are portions of template sequence for NFkB1 template AluSq2 range=chr4:102459487-102459783 having a high identity with ITFG1 (ENST00000320640.10) gene.
[0140] SEQ ID NO:795-800 are portions of template sequence for NFkB1 template AluSq2 range=chr4:102459487-102459783 having a high identity with MAPKAP1 (ENST00000373511.6) gene.
[0141] SEQ ID NO:801 is a portion of template sequence for NFkB1 template AluSq2 range=chr4:102459487-102459783 having a high identity with CTNNA1 (ENST00000627109.2) gene.
[0142] SEQ ID NO:802 is a portion of template sequence for NFkB1 template L1M6 range=chr4:102457972-102458156 having a high identity with IMPA1 (ENST00000256108.9) gene.
[0143] SEQ ID NO:803 is a portion of template sequence for NFkB1 template LTR16A2 range=chr4:102457329-102457742 having a high identity with ESRRB (ENST00000512784.6) gene.
[0144] SEQ ID NO:804 is a portion of template sequence for NFkB1 template MamGypLTR1c range=chr4:102456686-102456865 having a high identity with CALN1 (ENST00000329008.9) gene.
[0145] SEQ ID NO:805-806 are portions of template sequence for NFkB1 template LTR81B range=chr4:102454134-102454208 having a high identity with GPC6 (ENST00000377047.8) gene.
[0146] SEQ ID NO:807 is a portion of template sequence for NFkB1 template LTR81B range=chr4:102453693-102453809 having a high identity with SEMA4A (ENST00000355014.6) gene.
[0147] SEQ ID NO:808 is a portion of template sequence for NFkB1 template LTR81B range=chr4:102453693-102453809 having a high identity with FMN1 (ENST00000616417.4) gene.
[0148] SEQ ID NO:809-811 are portions of template sequence for NFkB1 template LTR81B range=chr4:102453693-102453809 having a high identity with SDK1 (ENST00000404826.6) gene.
[0149] SEQ ID NO:812 is a portion of template sequence for NFkB1 template LTR81B range=chr4:102453693-102453809 having a high identity with PAK1 (ENST00000356341.7) gene.
[0150] SEQ ID NO:813 is a portion of template sequence for NFkB1 template LTR81B range=chr4:102453693-102453809 having a high identity with NFIA (ENST00000371191.5) gene.
[0151] SEQ ID NO:814 is a portion of template sequence for NFkB1 template FLAM_A range=chr4:102469163-102469262 having a high identity with WTIP (ENST00000590071.6) gene.
[0152] SEQ ID NO:815-816 are portions of template sequence for NFkB1 template FLAM_A range=chr4:102469163-102469262 having a high identity with TBC1D1 (ENST00000261439.8) gene.
[0153] SEQ ID NO:817-819 are portions of template sequence for NFkB1 template FLAM_A range=chr4:102469163-102469262 having a high identity with TBC1D3P5 (NR_033892.1) gene.
[0154] SEQ ID NO:820-822 are portions of template sequence for NFkB1 template FLAM_A range=chr4:102469163-102469262 having a high identity with KSR1 (ENST00000644974.1) gene.
[0155] SEQ ID NO:823-825 are portions of template sequence for NFkB1 template MIRb range=chr4:102469431-102469661 having a high identity with PRICKLE2 (ENST00000638394.1) gene.
[0156] SEQ ID NO:826 is a portion of template sequence for NFkB1 template MIRb range=chr4:102469431-102469661 having a high identity with PARP9 (ENST00000477522.6) gene.
[0157] SEQ ID NO:827 is a portion of template sequence for NFkB1 template MIRb range=chr4:102469431-102469661 having a high identity with RFTN2 (ENST00000295049.8) gene.
[0158] SEQ ID NO:828 is a portion of template sequence for NFkB1 template MIRb range=chr4:102469431-102469661 having a high identity with ADCY9 (ENST00000294016.7) gene.
[0159] SEQ ID NO:829 is a portion of template sequence for NFkB1 template MIRb range=chr4:102469431-102469661 having a high identity with NCOA1 (ENST00000406961.5) gene.
[0160] SEQ ID NO:830-835 are portions of template sequence for NFkB1 template MLT1A0 range=chr4:102468399-102468755 having a high identity with OTOA (ENST00000646100.1) gene.
[0161] SEQ ID NO:836-840 are portions of template sequence for NFkB1 template MLT1A0 range=chr4:102468399-102468755 having a high identity DUSP27 (ENST00000361200.6) gene.
[0162] SEQ ID NO:841-846 are portions of template sequence for NFkB1 template MLT1A0 range=chr4:102468399-102468755 having a high identity with DUSP27 (ENST00000361200.6) gene.
[0163] SEQ ID NO:847-856 are portions of template sequence for NFkB1 template L1MD1 range=chr4:102470492-102471503 having a high identity with ATP10B (XM_011534468.2) gene.
[0164] SEQ ID NO:857-864 are portions of template sequence for NFkB1 template L1MD1 range=chr4:102470492-102471503 having a high identity with MED13L (ENST00000281928.8) gene.
[0165] SEQ ID NO:865-883 are portions of template sequence for NFkB1 template MLT1A0-int range=chr4:102466803-102468398 having a high identity with KLHL40 (ENST00000287777.4) gene.
[0166] SEQ ID NO:884-889 are portions of template sequence for NFkB1 template AluSx1 range=chr4:102499715-102499995 having a high identity with UNKL (ENST00000389221.8) gene.
[0167] SEQ ID NO:890-895 are portions of template sequence for NFkB1 template AluSx1 range=chr4:102499715-102499995 having a high identity with GPATCH3 (ENST00000361720.9) gene.
[0168] SEQ ID NO:896-902 are portions of template sequence for NFkB1 template MLT1C range=chr4:102498997-102499448 having a high identity with DCAF17 (ENST00000375255.7) gene.
[0169] SEQ ID NO:903-908 are portions of template sequence for NFkB1 template MLT1C range=chr4:102498997-102499448 having a high identity with ADGRL3 (ENST00000512091.6) gene.
[0170] SEQ ID NO:909-915 are portions of template sequence for NFkB1 template MSTB1 range=chr4:102498326-102498742 having a high identity with MTMR1 (ENST00000370390.7) gene.
[0171] SEQ ID NO:916-923 are portions of template sequence for NFkB1 template MLT1C range=chr4:102498997-102499448 having a high identity with PRR5L (ENST00000530639.5) gene.
[0172] SEQ ID NO:924 is a portion of template sequence for NFkB1 template MIR range=chr4:102497855-102498045 having a high identity with INPP5D (ENST00000359570.9) gene.
[0173] SEQ ID NO:925 is a portion of template sequence for NFkB1 template MIR range=chr4:102497855-102498045 having a high identity with MIR3681HG (ENST00000451644.5) gene.
[0174] SEQ ID NO:926 is a portion of template sequence for NFkB1 template L2 range=chr4:102497231-102497825 having a high identity with SCAI (ENST00000336505.10) gene.
[0175] SEQ ID NO:927-933 are portions of template sequence for NFkB1 template MLT1B range=chr4:102496240-102496617 having a high identity with IL10RA (ENST00000227752.7) gene.
[0176] SEQ ID NO:934-940 are portions of template sequence for NFkB1 template MLT1B range=chr4:102496240-102496617 having a high identity with FAM89A (ENST00000366654.4) gene.
[0177] SEQ ID NO:941-942 are portions of template sequence for NFkB1 template MER81 range=chr4:102496090-102496191 having a high identity with IFT52 (ENST00000373030.7) gene.
[0178] SEQ ID NO:943 is a portion of template sequence for NFkB1 template L1MEj range=chr4:102493931-102494278 having a high identity with DCAF6 (ENST00000432587.6) gene.
[0179] SEQ ID NO:944-955 are portions of template sequence for NFkB1 template L1PB1 range=chr4:102485859-102488680 having a high identity with EGLN1 (ENST00000366641.3) gene.
[0180] SEQ ID NO:956-1006 are portions of template sequence for NFkB1 template L1PB1 range=chr4:102485859-102488680 having a high identity with NRG1 (ENST00000519301.5) gene.
[0181] SEQ ID NO:1007-1062 are portions of template sequence for NFkB1 template L1PB1 range=chr4:102485859-102488680 having a high identity with WARS2 (ENST00000369426.9) gene.
[0182] SEQ ID NO:1063-1084 are portions of template sequence for NFkB1 template L1PB1 range=chr4:102485859-102488680 having a high identity with KSR2 (ENST00000425217.5) gene.
[0183] SEQ ID NO:1085-1106 are portions of template sequence for NFkB1 template L1PB1 range=chr4:102485859-102488680 having a high identity with RPAP3 (ENST00000005386.7) gene.
[0184] SEQ ID NO:1107-1141 are portions of template sequence for NFkB1 template LTR12C range=chr4:102482956-102484656 having a high identity with NPBWR1 (ENST00000331251.3) gene.
[0185] SEQ ID NO:1142-1242 are portions of template sequence for NFkB1 template L1PA6 range=chr4:102477934-102482955 having a high identity with KSR2 (ENST00000425217.5) gene.
[0186] SEQ ID NO:1243-1343 are portions of template sequence for NFkB1 template L1PA6 range=chr4:102477934-102482955 having a high identity with SENP6 (ENST00000370010.6) gene.
[0187] SEQ ID NO:1344-1444 are portions of template sequence for NFkB1 template L1PA6 range=chr4:102477934-102482955 having a high identity with CD207 (XM_011532876.2) gene.
[0188] SEQ ID NO:1445-1447 are portions of template sequence for NFkB1 template L1PA6 range=chr4:103619161-103619277 having a high identity with TAMM41 (ENST00000623275.3) gene.
[0189] SEQ ID NO:1448-1450 are portions of template sequence for NFkB1 template L1PA6 range=chr4:103619161-103619277 having a high identity with TAMM41 (ENST00000273037.9) gene.
[0190] SEQ ID NO:1451 is a portion of template sequence for NFkB1 template L2a range=chr4:102505799-102505857 having a high identity with LTBP1 (ENST00000404816.6) gene.
[0191] SEQ ID NO:1452 is a portion of template sequence for NFkB1 template L2a range=chr4:102505799-102505857 having a high identity with AGBL4 (ENST00000371839.5) gene.
[0192] SEQ ID NO:1453 is a portion of template sequence for NFkB1 template L2a range=chr4:102505799-102505857 having a high identity with SMILR (NR_131202.1) gene.
[0193] SEQ ID NO:1454 is a portion of template sequence for NFkB1 template L2a range=chr4:102505799-102505857 having a high identity with EHBP1 (ENST00000405015.7) gene.
[0194] SEQ ID NO:1455-1458 are portions of template sequence for NFkB1 template AluSz6 range=chr4:102507477-102507601 having a high identity with PLCE1 (ENST00000371380.7) gene.
[0195] SEQ ID NO:1459-1465 are portions of template sequence for NFkB1 template AluSz6 range=chr4:102507477-102507601 having a high identity with KSR2 (ENST00000425217.5) gene.
[0196] SEQ ID NO:1466-1468 are portions of template sequence for NFkB1 template AluSz6 range=chr4:102507477-102507601 having a high identity with KLHL12 (NM_001303051.1) gene.
[0197] SEQ ID NO:1469 is a portion of template sequence for NFkB1 template HAL1ME range=chr4:102510807-102511027 having a high identity with DAB1 (ENST00000371236.6) gene.
[0198] SEQ ID NO:1470-1472 are portions of template sequence for NFkB1 template HAL1ME range=chr4:102510807-102511027 having a high identity with NF1 (ENST00000356175.7) and EVI2B (ENST00000330927.4) genes.
[0199] SEQ ID NO:1473 is a portion of template sequence for NFkB1 template HAL1ME range=chr4:102510807-102511027 having a high identity with CRYZL1 (ENST00000361534.6) gene.
[0200] SEQ ID NO:1474-1475 are portions of template sequence for NFkB1 template L1MA9 range=chr4:102511116-102511227 having a high identity with SLC35F3 (ENST00000366618.7) gene.
[0201] SEQ ID NO:1476-1477 are portions of template sequence for NFkB1 template LIMA9 range=chr4:102511116-102511227 having a high identity with MACF1 (ENST00000567887.5) gene.
[0202] SEQ ID NO:1478-1479 are portions of template sequence for NFkB1 template L1MA9 range=chr4:102511116-102511227 having a high identity with CTNNA3 (ENST00000433211.6) gene.
[0203] SEQ ID NO:1480-1481 are portions of template sequence for NFkB1 template L1MA9 range=chr4:102511116-102511227 having a high identity with MACF1 (ENST00000567887.5) gene.
[0204] SEQ ID NO:1482 is a portion of template sequence for NFkB1 template L2a range=chr4:102511254-102511361 having a high identity with LRP5L (ENST00000402859.6) gene.
[0205] SEQ ID NO:1483 is a portion of template sequence for NFkB1 template L2a range=chr4:102511254-102511361 having a high identity PCDH9 (ENST00000377865.6) gene.
[0206] SEQ ID NO:1484 is a portion of template sequence for NFkB1 template L2a range=chr4:102511254-102511361 having a high identity GAK (ENST00000314167.8) gene.
[0207] SEQ ID NO:1485-1491 are portions of template sequence for NFkB1 template AluJo range=chr4:102511394-102511703 having a high identity with PAUPAR (ENST00000644607.1) gene.
[0208] SEQ ID NO:1492-1497 are portions of template sequence for NFkB1 template AluJo range=chr4:102511394-102511703 having a high identity with POLR3A (ENST00000372371.7) gene.
[0209] SEQ ID NO:1498-1503 are portions of template sequence for NFkB1 template AluJo range=chr4:102511394-102511703 having a high identity with COMMD10 (ENST00000274458.8) gene.
[0210] SEQ ID NO:1504 is a portion of template sequence for NFkB1 template LIME3B range=chr4:102511709-102511897 having a high identity PPP1R16B (ENST00000299824.6) gene.
[0211] SEQ ID NO:1498-1503 are portions of template sequence for NFkB1 template AluJo range=chr4:102511394-102511703 having a high identity with COMMD10 (ENST00000274458.8) gene.
[0212] SEQ ID NO:1504 is a portion of template sequence for NFkB1 template LIME3B range=chr4:102511709-102511897 having a high identity PPP1R16B (ENST00000299824.6) gene.
[0213] SEQ ID NO:1505-1510 are portions of template sequence for NFkB1 template AluJr range=chr4:102512340-102512644 having a high identity with C SPOCK2 (NM_001244950.2) gene.
[0214] SEQ ID NO:1511-1516 are portions of template sequence for NFkB1 template AluJr range=chr4:102512340-102512644 having a high identity with TNRC6A (NM_001351850.2) gene.
[0215] SEQ ID NO:1517-1522 are portions of template sequence for NFkB1 template AluY range=chr4:102513892-102514190 having a high identity with RFX3-AS1 (ENST00000423112.2) gene.
[0216] SEQ ID NO:1523-1529 are portions of template sequence for NFkB1 template AluYa5 range=chr4:102515108-102515409 having a high identity with PLCE1 (ENST00000371380.8) gene.
[0217] SEQ ID NOS:1530-1531 are TE template sequences for NFkB1 promoter non-processive transcripts range=chr4:102499993-102500159 having high identity with RBM15 (ENST00000369784.7) gene.
[0218] SEQ ID NOS:1532 is a portion of TE template sequences for NFkB1 promoter non-processive transcripts range=chr4:102499993-102500159 having high identity with AC022634.2 (ENST00000521504.1) gene.
[0219] SEQ ID NOS:1533 is a portion of TE template sequences for NFkB1 promoter non-processive transcripts range=chr4:102499993-102500159 having high identity with RPL3 (ENST00000216146.8) gene.
[0220] SEQ ID NOS:1534 is a portion of TE template sequences for NFkB1 promoter non-processive transcripts range=chr4:102499993-102500159 having high identity with VTRNA3-1P (ENST00000362552.1) gene.
[0221] SEQ ID NOS:1535 is a portion of TE template sequences for NFkB1 promoter non-processive transcripts range=chr4:102499993-102500159 having high identity with BIRC3 (ENST00000615299.4) gene.
[0222] SEQ ID NOS:1536 is a portion of TE template sequences for NFkB1 promoter non-processive transcripts range=chr4:102499993-102500159 having high identity with InterGenic_Chr18:40901840-40901861 gene.
[0223] SEQ ID NOS:1537-1613 are TE template sequences for lncRNA_{LOC105377621}.
[0224] SEQ ID NOS:1614-1793 are TE template sequences for NFkB2.
[0225] SEQ ID NOS:1794-1888 are TE template sequences for RELA.
[0226] SEQ ID NOS:1889-2237 are TE template sequences for 1ncRNA_{RELA-DT}.
[0227] SEQ ID NOS:2238-2601 are TE template sequences for MyoD1.
[0228] SEQ ID NOS:2602-2852 are TE template sequences for lncRNA_{MyoD1}.
[0229] SEQ ID NOS:2853-3243 are TE template sequences for lncRNA_{SRA1}.
[0230] SEQ ID NOS:3244-3255 are TE template sequences for CUX2.
[0231] SEQ ID NOS:3256-3263 are TE template sequences for PRKN.
[0232] SEQ ID NOS:3264-3285 are TE template sequences for KSR2.
[0233] SEQ ID NOS:3286-3311 are TE template sequences for FAK.
[0234] SEQ ID NOS:3312-3401 are TE template sequences for Wnt2.
[0235] SEQ ID NOS:3402-3481 are TE template sequences for Wnt10B.
[0236] SEQ ID NOS:3482-3492 are TE template sequences for Wnt3A.
[0237] SEQ ID NOS:3493-3516 are TE template sequences for Wnt5B.
[0238] SEQ ID NOS:3517-3532 are TE template sequences for Wnt5A.
[0239] SEQ ID NOS:3533-3754 are TE template sequences for CRHR2.
[0240] SEQ ID NOS:3755-3767 are TE template sequences for PPARG.
[0241] SEQ ID NOS:3768-3836 are TE template sequences for NR3C1.
[0242] SEQ ID NOS:3837-3884 are TE template sequences for BRD4.
[0243] SEQ ID NOS:3885-3918 are TE template sequences for CD4.
[0244] SEQ ID NOS:3919-4076 are template DNA sequences.

### DETAILED DESCRIPTION OF THE INVENTION

### I. Definitions

[0245] “TE” refers to Transposable Elements (a.k.a. Transposons).

[0246] “TE remnant” (TEr) refers to TE no longer capable of transposition.

[0247] “Sibling TEr” refers to progeny TE that are replicated during a single transposition event that retain the sequence variations of the parent TE.

[0248] “Pathway Hub Gene” and “Index Gene” both refer to an essential gene within a biological process that is densely interconnected with other genes participating in that process; “hub” genes mediate interactions between less connected genes, therefore keeping the network together.

[0249] “Index TEr” refers to the TEr chosen from the index gene-of-interest.

[0250] “Nonprocessive transcript” (NPtx) as used herein refers to nascent RNA transcripts of variable lengths resulting from aborted transcriptional elongation of RNA-polymerases (in sense or antisense) within gene regulatory regions; wherein RNA Polymerase I, II or III initiates transcription, aborts and recycles, resulting in synthesis incomplete RNA transcripts. Euchromatin genes produce promoter and promoter-proximal nonprocessive transcripts of no known function.

[0251] “Processive transcription” refers to continuous RNA polymerase I, II or II elongation to completion of the full messenger RNA transcripts.

[0252] “Transcriptional regulatory regions” includes enhancer, promoter, promoter-proximal and intronic regions of genes.

[0253] “Core Template Sequences” refers to the high identity (but not necessarily identical “sibling TE”) sequences within index TEr-aligned genes (FIG. 9). The patent claims these sequences as well as index TEr sequences.

### II. Introduction

[0254] It is of considerable importance to screen for—and treat—persons with pathogenic gene transcriptional networks such as cancer, or diseases in which multiple genes are abnormally regulated but the encoded proteins are normal, as with Parkinson's disease. The present invention fills these and other needs. The present disclosure provides for the first time that DNA sequences encoding transcripts of unknown function such as Transposable Element remnant (TEr) RNA or promoter non-processive transcripts (NPtx) have a high probability of grouping functionally-linked genes into precise pathways in silico, based on high identity nucleic acid sequence homology alone. For example, using UCSC BLAT or NCI BLASTn alignment algorithms, different TEr sequences within NFkB1 (critical cell activation gene) intron 1 were found to have a high likelihood of aligning to genes initiating epithelial to mesenchymal transition (EMT). Sharing high identity “junk” sequence occurred within transcriptional regulatory regions of functionally-linked genes of myogenesis, stress-related fat metabolism and Tₕ-immune cell activation, suggesting that protein-to-protein networks are mirrored by direct “junk-to-junk” networking between the genes that encode them. NFkB1 promoter non-processive “junk” transcripts aligned to genes participating in formation, processing, packaging and function of mRNA. The lncRNA SRA1 (Steroid Receptor RNA Activator 1) initiates transcription at a TEr that aligned multiple genes associated with Parkinson's Disease (PD), suggesting a new model of PD pathogenesis based on aberrant transcriptional network signaling, rather than malfunction of a single gene or protein.

[0255] Astonishingly, exonic TEr ofNFkB1's cis lncRNA-RP11-499E18.1 aligned some of the same EMT genes as NFkB1 intron 1 TEr, with equally high identity. SiRNA-mediated knock down of RP11-499E18.1 isoforms (546-673nt; TEr comprise 3 of 3, or 3 of 4, exons) revealed it participates in the maintenance of cell differentiation. In its absence, well-differentiated pancreatic adenocarcinoma epithelioid cells transitioned toward a mesenchymal phenotype, and poorly-differentiated pancreatic adenocarcinoma cells completely de-differentiated. The most parsimonious hypothesis for mechanism of action is that shared high identity junk RNA, dispersed by transposition over millennia and evolutionarily conserved if beneficial, contributes to the guidance of epigenetic chromatin-modifying complexes between functionally-linked genes.

[0256] Nucleic acid sequences that are shared in high identity are known to guide primed Argonautes and lncRNA to complementary sequence within the nucleus. (Xie M, Hong C, Zhang B, Lowdon R F, Xing X, Li D, et al. DNA hypomethylation within specific transposable element families associates with tissue-specific enhancer landscape. Nature Genetics. 2013; Rajan K S, Velmurugan G, Gopal P, Ramprasath T, Babu D D V, Krithika S, et al. Abundant and Altered Expression of PIWI-Interacting RNAs during Cardiac Hypertrophy. Heart Lung and Circulation. 2016; Kapusta A, Kronenberg Z, Lynch V J, Zhuo X, Ramsay L A, Bourque G, et al. Transposable Elements Are Major Contributors to the Origin, Diversification, and Regulation of Vertebrate Long Noncoding RNAs. PLoS Genetics. 2013; Profumo V, Forte B, Percio S, Rotundo F, Doldi V, Ferrari E, et al. LEADeR role of miR-205 host gene as long noncoding RNA in prostate basal cell differentiation. Nature Communications. 2019; 10(1):307; Rajasethupathy P, Antonov I, Sheridan R, Frey S, Sander C, Tuschl T, et al. A role for neuronal piRNAs in the epigenetic control of memory-related synaptic plasticity. Cell. 2012; Zhang X-O, Gingeras T R, Weng Z. Genome-wide analysis of polymerase III-transcribed Alu elements suggests cell-type-specific enhancer function. Genome research. 2019; 29(9):1402-14.)

[0257] The present inventor hypothesized that ability of transposons to disperse small groups of high-identity TE variants (TEr) during transposition, and mechanisms by which chromatin-modifiers are shuttled between genes guided by sequences of high identity complementarity suggested that high-identity TE variant sequences can themselves be signals that participate in precise gene-to-gene transcriptional crosstalk, unrelated to their subtype classification or transcription factor binding sites. Because high identity TE “siblings” (FIG. 1) disperse copies of parental TE containing small sequence variations, the potential exists that they participate in transcriptional “crosstalk” that is evolutionarily beneficial. The inventor further hypothesize that DNA “promoter slippage” nonprocessive transcripts (NPtx) are conserved following gene duplications if they are similarly beneficial.

[0258] Both TEr and NPtx sequences within key pathway genes have the potential to signal transcription rates to others within the pathway, by allowing, for example, network hub genes to communicate epigenetic transcriptional instructions to their functionally-linked partners.

[0259] The most parsimonious mechanisms by which shared high identity variant sequences contribute to transcriptional networks are:

[0260] 1) TEr, NPtx and other “junk” non-processive RNA transcripts become guides for “junk”-primed nuclear Argonautes (FIG. 2); and 2) nuclear lncRNA that contains exonic TEr or NPtx sequences is guided to specific DNA loci transcribing complementary sequences (FIG. 3).

[0261] Consequently, the inventor, for the first time, demonstrated that NPtx and TEr sequences of unknown function group functionally-linked genes into precise pathways, based on high identity nucleic acid sequence homology alone. These results suggest for the first time that protein networks are mirrored in the genes that encode them through the sharing of high identity “junk” DNA sequences.

[0262] The findings provide a novel method to identify nucleic acid sequences that can modulate gene-to-gene transcriptional signaling and the potential for their use (individually or in a “cocktail”) to augment, alter, block or otherwise modify the transcription of multiple genes within a network.

[0263] Accordingly, oligonucleotides (Oligos) and/or short and/or long noncoding RNAs (lncRNAs) and/or dsRNAs that function as, or are processed into, transcription activating (a)RNAs or small inhibiting (si)RNAs that are templated on the novel discovery of TEr and/or NPtx sequences that target many genes of a cellular pathway specifically and simultaneously. The invention includes modifications of the oligos such as to allow the synthetic addition of nuclear localization signals and/or “bar codes” and/or other nucleic acid identifiers and/or other synthetic modifiers.

[0264] Unlike siRNA and miRNA-mediated networks which co-regulate the cytoplasmic levels of mRNAs via complementary 3′UTR “seed” sequences, the TEr and NPtx sequences that have been identified are within gene enhancer, promoter and intronic regions. Unlike miRNA, they share high identity with other NPtx/TEr DNA in similar regions of functionally-linked genes, rather than the 3′UTR of mRNA.

[0265] Unlike piRNAs, which are specific to germ cells, TEr are expressed in somatic cells. In addition, piRNA/PIWIs primary function is thought to be the repression of actively transposing TE that could cause genetic mutation. In contrast, TEr expression may be a normal transcription regulatory activity and that TEr-primed nuclear argonautes may activate as well as suppress (return to quiescence) specific gene pathways within a somatic cell.

[0266] Unlike eRNAs, NPtx and TEr fragments are transcribed from many transcriptional regulatory regions, not just enhancer regions. To date, there are no reports of TEr sequences that have been termed “eRNA”.

[0267] Alignments were not pericentromeric and rarely in 3′UTR of coding-genes. All TE families and subtypes were represented in percentages consistent with their reported frequency in the human genome.

[0268] Unlike the multiple previous reports of TE that have been exacted to function as cell-type specific enhancers for their nearby protein-coding genes, the TEr identified here are networking between multiple genes using a mechanism other than potentially shared Transcription Factor DNA binding sites. The most parsimonious mechanism by which TEr may be networking is via RNA-mediated transcriptional gene silencing or activation.

### III. Beneficial Embodiments

[0269] 1. Oligos designed with the ability to disrupt or augment a pathway, for example: activation of angiogenesis pathways might be desired in ischemic cardiac tissue whereas inhibition of angiogenesis pathway might be desired for tumor therapy.

[0270] 2. There are many ways to trigger tumorigenesis and there are many different tumor types; however, common pathways are triggered when tumors progress. Oligos can be designed to inhibit common EMT pathways, thus maintaining tumor heterogeneity and responsiveness to individualized tumor therapies.

[0271] 3. Alternate pathways to cell proliferation and survival can develop that lead to resistance to therapeutic interventions. For chemoresistance in tumor cells, Oligo design would target genes that initiate several pathways, including cell activation and epithelial to mesenchymal transition, templated on TEr of the NFkB1 gene.

[0272] 4. Oligos designed for diagnostic and prognostic significance of diseases associated with the dysregulation of multiple genes, such as determination of levels of the single TEr sequence discovered in studies to be presented here to be associated with Parkinson's Disease.

[0273] 5. Oligos designed to trigger or modify stem cells to differentiate into a tissue and/or cell type-of-interest and/or inducing specific differentiation or developmental stages in cells, tissue and/or tissue samples.

### IV. Brief Summary of Invention

[0274] The invention involves the use of novel nucleic acid sequences to detect, modulate, ablate, inhibit or augment the transcription and therefore translation and expression of functionally-linked genes.

[0275] Therapeutic nucleic acid molecules have been developed that target single genes or mRNAs are termed miRNA. Although single miRNAs can target multiple mRNAs simultaneously, miRNAs function at the posttranscriptional level, when an abnormal gene communication pathway has already begun. There is a need for molecules such as TEr and NPtx that can target multiple genes within a pathological pathway at the transcriptional level (where gene expression initiates) including genes sharing high identity TEr sequence that are otherwise unknown to be participating in the pathway.

[0276] Although the present invention has been described in considerable detail with reference to certain preferred embodiments, other embodiments are possible. The steps disclosed for a presently disclosed method, for example, are not intended to be limiting nor are they intended to indicate that each step is necessarily essential to the method, but instead are exemplary steps only. Therefore, the scope of the appended claims should not be limited to the description of preferred embodiments contained in this disclosure.

### V. Embodiments

[0277] In a first set of embodiments, the invention provides the method of identifying DNA sequences that are shared by several genes participating in an individual biologic pathway.

[0278] In a second set of embodiments, the invention provides methods of determining nucleic acid template sequences against which gene activating or inhibitory molecules can be designed and directed, including, but not restricted to, small interfering RNAs (siRNA), short hairpin RNA (shRNA), morpholino, or antisense oligonucleotides; for diagnostic, prognostic or therapeutic purposes.

[0279] In the first and second set of embodiments, the sequence is a transposon that is an autonomous element or a nonautonomous element. The transposon can also be a DNA transposon or a retrotransposon, including an LTR retrotransposon and a non-LTR retrotransposon. More specifically, an LTR retrotransposon can include an endogenous retrovirus (ERV); and a non-LTR retrotransposon can include a SINE retrotransposon, such as an Alu sequence or SINE-VNTR-Alus (SVA); or a LINE element, such as L1, or a LINE-like element, such as R1 or R2.

[0280] In the first and second set of embodiments, the sequence is the product of non-processive transcription within a gene promoter, its 5′ or 3′ enhancer (sequence not otherwise claimed as “enhancer RNA” or “lncRNA”) or the transcriptional regulatory region of an intron.

[0281] In a third set of embodiments, the invention provides methods of delaying Epithelial to Mesenchymal Transition and/or cancer stem cell proliferation, comprising administering to a subject in need of such treatment an effective amount of TE sequence complementary to expressed pathway-specific TE or NPtx.

[0282] In a fourth set of embodiments, the invention provides methods of delaying pathologic cardiovascular decline, or stimulation of myoblast/myocyte regeneration following ischemic or other insult, comprising administering to a subject in need of such treatment an effective amount of TE sequence complementary to expressed pathway-specific TE or NPtx.

[0283] In a fifth set of embodiments, the invention provides methods of diagnosing and delaying pathologic neuronal decline, comprising administering to a subject in need of such treatment an effective amount of TE sequence complementary to expressed pathway-specific TE or NPtx.

[0284] In a sixth set of embodiments, the invention provides methods of modulating pathologic abnormalities of any and all cellular or tissue pathways, comprising administering to a subject in need of such treatment an effective amount of TE sequence complementary to expressed pathway-specific TE or NPtx.

[0285] In a seventh set of embodiments, the invention provides methods of activating latent viral and/or “hidden” quiescent metastatic cells, such that therapy targeting actively proliferating virus or cells can be implemented.

[0286] In other embodiments, the invention provides methods to trigger or modify stem cells to differentiate into a tissue and/or cell type-of-interest and/or inducing specific differentiation or developmental stages in cells, tissue and/or tissue samples.

[0287] In other embodiments, the invention provides recombinant nucleic acid sequences for detection and monitoring of diseases including, but not restricted to, autoimmune disease, cardiovascular disease, metabolic syndrome, obesity, neurodegenerative disease, and proliferative or oncogenic diseases.

[0288] In other embodiments, the invention provides recombinant nucleic acid sequences for detection and analysis of potentially active or inactive pathways in vitro.

[0289] In another aspect of the methods, the NPtx and TE-template oligonucleotide is a mixture, or a “cocktail” formulated as a pharmaceutical composition and is administered to the subject in a therapeutically effective amount. The oligonucleotide may also be administered together or in conjunction with other agents.

[0290] The present invention also includes additions or modification to nucleic acid sequences claimed here that directs its nuclear import.

[0291] The present invention also includes a cell comprising any of recombinant nucleic acid sequences designed using the Method. The invention also includes a transgenic animal, including a transgenic vertebrate, comprising any of the recombinant nucleic sequences designed using the Method (or cell that contains any of them).

[0292] In one or more embodiments, the present invention includes a synthetic nucleic acid comprising one or more of a transposon remnant, a promoter and/or a promoter-proximal non-processive transcript, and selected to modulate gene-to-gene transcriptional signaling within a given functional pathway. In some embodiments, the synthetic nucleic acid to further modulate transcription of a plurality of genes within a network.

[0293] In some embodiments, the synthetic nucleic acid has a sequence that aligns with high identity to transcriptional regulatory regions of genes participating in the given functional pathway. The high identity is defined based on UCSC BLAT and/or NCBI BLASTn alignment or other quality controlled alignment algorithm.

[0294] In some embodiments, the synthetic nucleic acid has a sequence selected from top ten BLAT₂₀₁₃ alignments.

[0295] In some embodiments, the synthetic nucleic acid—also includes nuclear localization sequences.

[0296] In some embodiments, the given functional pathway is selected from the group consisting of epithelial to mesenchymal transition pathway, phospholipid signaling pathway, myogenesis pathway, stress-mediated fat metabolism pathway, CD4+ T-cell activation and HIV binding pathway, and a Parkinson's Disease-associated pathway.

[0297] In one or more embodiments, the present invention includes a method of modulating epigenetic communication between genes coordinating specific pathways. The method includes delivering one or more of the synthetic nucleic acids disclosed herein to a sample of cells and/or a tissue.

[0298] In some embodiments, delivering the one or more synthetic nucleic acids comprises a delivery vehicle comprising the one or more nucleic acids, and nanoparticles or extracellular vesicles.

[0299] In some embodiments, modulating the epigenetic communication between genes coordinating specific pathways comprises ablate, inhibit or augment the transcription, translation or expression of one or more of functionally-linked genes.

[0300] In some embodiments, the method further includes determining a set of functionally-linked genes. In some embodiments, determining the set of functionally-linked genes comprises: (a) selecting a transposon remnant, a promoter, or a promoter-proximal non-processive transcript of a first index gene from a given functional pathway; (b) identifying, using a computer implemented sequence alignment algorithm implemented by a processor, transposon remnant sequences from a set of genes, having at least 75% homology with the selected transposon remnant, promoter, or promoter-proximal non-processive transcript; (c) determining, by the processor, a genomic position of the transposon remnant sequences with highest sequence identity with the selected transposon remnant, promoter, or promoter-proximal non-processive transcript; (d) in response to a determination that the genomic position of a given identified transposon remnant sequence is within a gene regulatory region of a first gene among the set of genes, tabulating, by the processor, function of the first gene; (e) repeating (a)-(d) for identified transposon remnant sequences that are in cis to the selected transposon remnant, promoter, or promoter-proximal non-processive transcript to determine transposon remnant sequences of genes connected to the first index gene; and (f) repeating ((e) with transposon remnant sequences of genes, among the set of genes, connected to the first index gene to determine a group of genes forming the given functional pathway.

[0301] In some embodiments, the method further includes: (g) repeating (a)-(f) for a second index gene.

[0302] In one or more embodiments, the invention includes a method of determining a network of genes, the method comprising the steps of (a) selecting a transposon remnant, a promoter, or a promoter-proximal non-processive transcript of a first index gene from a given functional pathway; (b) identifying, using a computer implemented sequence alignment algorithm implemented by a processor, transposon remnant sequences from a set of genes, having at least 75% homology with the selected transposon remnant, promoter, or promoter-proximal non-processive transcript; (c) determining, by the processor, a genomic position of the transposon remnant sequences with highest sequence identity with the selected transposon remnant, promoter, or promoter-proximal non-processive transcript; (d) in response to a determination that the genomic position of a given identified transposon remnant sequence is within a gene regulatory region of a first gene among the set of genes, tabulating, by the processor, function of the first gene; (e) repeating (a)-(d) for identified transposon remnant sequences that are in cis to the selected transposon remnant, promoter, or promoter-proximal non-processive transcript to determine transposon remnant sequences of genes connected to the first index gene; and (f) repeat (a)-(e) with transposon remnant sequences of genes, among the set of genes, connected to the first index gene to determine a group of genes forming the given functional pathway.

[0303] In some embodiments, the method may further include: (g) repeating (a)-(f) for a second index gene. In some embodiments, in response to a determination that the group of genes determined for the second index gene is different from the group of genes for the first index gene, determining that second index gene is from a functional pathway different from that of the given functional pathway.

[0304] In some embodiments, the selected transposon remnant, promoter, or promoter-proximal non-processive transcript includes one or more of a from one or more of a transcribed transposon remnant, an ancient transposon remnant, a conserved transposon remnant, a promoter region that is separated from a transcription start site by less than 5 kilobases (kb), an enhancer region that is separated from a promoter by less than 50 kb, promoter-proximal region, 5′ untranslated region; 3′ untranslated region, a first intron proximal to a transcription start site, and a non-processive transcript region in regulator region or a first intron proximal to a promoter.

[0305] In some embodiments, the first index gene is selected from 2013 UCSC human genome database.

[0306] In some embodiments, the computer implemented sequence alignment algorithm is BLAT₂₀₁₃.

[0307] In some embodiments, the given functional pathway is selected from the group consisting of epithelial to mesenchymal transition pathway, phospholipid signaling pathway, myogenesis pathway, stress-mediated fat metabolism pathway, CD4+ T-cell activation and HIV binding pathway, and a Parkinson's Disease-associated pathway.

[0308] In some embodiments, identifying transposon remnant sequences from a set of genes comprises identifying transposon remnant sequences having at least 90% homology with the selected transposon remnant, promoter, or promoter-proximal non-processive transcript.

[0309] In one or more embodiments, the present invention may include a method for inducing specific differentiation or developmental stages in cells. The method may include determining a group of genes forming a given functional pathway using a method of described herein; and delivering one or more synthetic nucleic acids comprising one or more of a transposon remnant, a promoter and/or a promoter-proximal non-processive transcript, and selected to modulate gene-to-gene transcriptional signaling within the given functional pathway. The given functional pathway is associated with the specific differentiation or developmental stages in cells.

[0310] In some embodiments, the one or more synthetic nucleic acids have a sequence that aligns with high identity to transcriptional regulatory regions of genes participating in the given functional pathway. In some embodiments, high identity is defined based on BLAT₂₀₁₃ alignment. In some embodiments, the synthetic nucleic acid has a sequence selected from top ten BLAT₂₀₁₃ alignments.

[0311] In some embodiments, the one or more synthetic nucleic acids further include nuclear localization sequences.

[0312] In some embodiments, delivering the one or more synthetic nucleic acids comprises delivering a delivery vehicle comprising the one or more nucleic acids, and nanoparticles or extracellular vesicles.

[0313] In some embodiments, the method may further include modulating the epigenetic communication between the group of genes forming the given functional pathway.

[0314] In some embodiments, modulating the epigenetic communication comprises one or more of ablating, inhibiting or augmenting the transcription, translation or expression of one or more of functionally-linked genes.

[0315] In some embodiments, the method may further include delivering an oligonucleotide selected to ablate, inhibit or augment the transcription, translation or expression of one or more of functionally-linked genes.

[0316] More generally, the invention is further directed to the general and specific embodiments defined, respectively, by the independent and dependent claims appended hereto, which are incorporated by reference herein.

### VI. Summary of TE Subtypes

[0317] TE subtypes are described in detail in Wells and Feschotte (Wells J N, Feschotte C. A Field Guide to Eukaryotic Transposable Elements. Annu Rev Genet. 2020; 54:539-61). In brief, DNA transposons use a “cut-and-paste” mechanism of replication. TEs that replicate via an RNA intermediate (“copy-and-paste”) include Long Interspersed Elements (LINEs), Short INterspersed elements (SINEs) and Long Terminal Repeat (LTR) retrotransposons. DNA, LTR and LINE elements contain RNA Pol2 binding sites and SINEs contain RNA Pol3 binding sites. SINEs, including the most numerous in the human genome, Alu Repeats, co-opt the LINE replication machinery to transpose. Mammalian-wide interspersed repeats (MIRs, the most ancient family of TEs in the human genome at >550 million years old; a.k.a “fossils”) are core sequences of tRNA-derived SINEs.

### EXAMPLES

### Example 1

[0318] Embodiments presented herein are based on the unique finding that Transposable Element remnant (TEr) RNA or promoter non-processive transcripts (NPtx) have a high probability of aligning with high identity to transcriptional regulatory regions of functionally-linked genes, suggesting that they participate in beneficial transcriptional crosstalk. In vitro data supports a functional requirement for “junk” sequences chosen from the key cell activation gene NFkB1. This in silico pattern occurred in multiple pathway-specific genes, including genes coordinating phospholipid signaling-mediated cell activation, epithelial to mesenchymal transition (EMT), myogenesis, stress-related fat metabolism and Tₕ-immune cell activation. A single TEr was shared with high identity between genes associated with Parkinson's Disease. In vitro analysis of TEr ofNFkB1cis lncRNA, which aligned with high identity to some of the same genes of EMT initiation as NFkB1 intron 1 TEr, revealed their participation in the maintenance of cell differentiation in cancer cells, as had been predicted by the in silico method disclosed herein.

[0319] The sequences disclosed herein are different than TE subtype-specific sequence or “similar control regions” such as shared transcription factor DNA binding sites. These NPtx and TEr sequences have not otherwise been classified as miRNA, piRNA, siRNA, eRNA or other RNA of known function. The invention includes nucleic acid sequences predicted to detect, modulate, ablate, inhibit or augment the transcription of genes of the above listed pathways.

[0320] The ability of transposition to disperse small groups of high-identity TE variants (“siblings”, FIG. 1) suggested the hypothesis that TEr participate in precise gene-to-gene transcriptional crosstalk based on shared nucleic acid sequences of high identity, unrelated to their transcription factor DNA binding sites or TE subtype-specific RNA secondary structure. High identity nucleic acid sequences guide Argonaute/chromatin-modifying complexes to nascent nuclear RNA containing complementary sequences (FIG. 2), as well as guide lncRNA-transcription factor scaffolds to specific genomic loci (FIG. 3); TEr have been shown to participate in both mechanisms of transcriptional regulation in somatic tissue. (Xie M, Hong C, Zhang B, Lowdon R F, Xing X, Li D, et al. DNA hypomethylation within specific transposable element families associates with tissue-specific enhancer landscape. Nature Genetics. 2013; Chishima T, Iwakiri J, Hamada M. Identification of transposable elements contributing to tissue-specific expression of long non-coding RNAs. Genes. 2018; Rajan K S, Velmurugan G, Gopal P, Ramprasath T, Babu D D V, Krithika S, et al. Abundant and Altered Expression of PIWI-Interacting RNAs during Cardiac Hypertrophy. Heart Lung and Circulation. 2016; Kapusta A, Kronenberg Z, Lynch V J, Zhuo X, Ramsay L A, Bourque G, et al. Transposable Elements Are Major Contributors to the Origin, Diversification, and Regulation of Vertebrate Long Noncoding RNAs. PLoS Genetics. 2013; Profumo V, Forte B, Percio S, Rotundo F, Doldi V, Ferrari E, et al. LEADeR role of miR-205 host gene as long noncoding RNA in prostate basal cell differentiation. Nature Communications. 2019; 10(1):307; Rajasethupathy P, Antonov I, Sheridan R, Frey S, Sander C, Tuschl T, et al. A role for neuronal piRNAs in the epigenetic control of memory-related synaptic plasticity. Cell. 2012; Holdt L M, Hoffmann S, Sass K, Langenberger D, Scholz M, Krohn K, et al. Alu Elements in ANRIL Non-Coding RNA at Chromosome 9p21 Modulate Atherogenic Cell Functions through Trans-Regulation of Gene Networks. PLoS Genetics. 2013; Alfeghaly C, Sanchez A, Rouget R, Thuillier Q, Igel-Bourguignon V, Marchand V, et al. Implication of repeat insertion domains in the trans-activity of the long non-coding RNA ANRIL. Nucleic Acids Research. 2021; 49(9):4954-70; KD, Ameen M, Guo H, Abilez O J, Tian L, Mumbach M R, et al. Endogenous Retrovirus-Derived lncRNA BANCR Promotes Cardiomyocyte Migration in Humans and Non-human Primates. Dev Cell. 2020; 54(6):694-709.e9; La Greca A, Scarafia M A, Hernández Cañás M C, Pérez N, Castañeda S, Colli C, et al. PIWI-interacting RNAs are differentially expressed during cardiac differentiation of human pluripotent stem cells. PLoS One. 2020; 15(5):e0232715.)

[0321] With the hypothesis that TEr variant sequences participate in RNA-mediated gene-to-gene transcriptional crosstalk that is evolutionarily beneficial, we tested the common assumption that “junk” variant TEr are physiologically irrelevant. Taking advantage of the sequence variations within individual TEr that allows their precise genomic positioning by computer algorithm, we examined the rate at which TEr sequences align in silico with high identity to other genes, and the position and identity of the genes to which they aligned (EXAMPLE 2). TEr were chosen from enhancer, promoter and intronic (predominantly promoter-proximal intron 1) regions of genes critical to three biologic pathways (“hub” genes). In a larger bioinformatics study, the rate of TEr alignments to pathway-specific genes within a biological pathway was contrasted to the rate of TEr alignments to pathway-specific genes of the other two groups (EXAMPLE 3). In addition, complete sets of enhancer, promoter and intron 1 TEr were evaluated for the individual hub genes NFkB1 and MyoD1 (EXAMPLES 4 and 5). The rate of their TEr alignments to pathway-specific genes were contrasted to random TEr and those of housekeeping genes. Significant sequence genomic alignment was arbitrarily defined as the top ten BLAT₂₀₁₃ alignments of UCSC database BLAT-2013(GRCh38/hg38). (Kent W J. BLAT—The BLAST-Like Alignment Tool. Genome Research. 2002.) Because TE contain repetitive sequence, it was anticipated that TEr genomic alignments would be abundant and random.

[0322] Surprisingly, the likelihood is high that TEr sequences derived from transcriptional regulatory regions of key pathway genes will align with high identity to other genes within the same pathway (EXAMPLES 6-10). Alignment is not linked to TFBS or subtype-specific sequence. Many TEr alignments were intergenic, to lncRNA of unknown function, or to genes with function that could not be directly associated with a specific pathway. However, the probability was high that both pathway-critical hub genes and, astonishingly, their adjacent (cis) lncRNA, contained TEr with high identity to other pathway-specific genes and, not infrequently, to different regions within the same gene (EXAMPLE 4). For example, primary cell-activation gene NFkBT and its cis lncRNA_{LOC105377621/RP11-499E18.1} contain TEr sequences that aligned with high identity to the same genes critical to epithelial to mesenchymal transition (EMT), including Latent-Transforming Growth Factor Beta-Binding Protein 1 (LTBP1) and Phosphatidylinositol-4-phosphate 3-kinase (PI3K). Numerous other genes of EMT were aligned by TEr ofNFkB1 or lncRNA_{LOC105377621/RP11-499E18.1}.

[0323] In vitro data confirms the predictive value of the method disclosed herein in designing a molecule based on these sequences that is a powerful modulator of epithelial to mesenchymal transition in pancreatic adenocarcinoma cell lines (EXAMPLE 4).

[0324] Hub gene TEr within other cellular pathways were also examined for genomic alignment. This pattern of in silico alignments was repeated in other critical genes related to EMT, such as FAK/PTK, b-Catenin and Wnt isoforms (EXAMPLES 4, 8). While most TEr were only transcribed at minimal levels if at all, numerous TEr in MyoD1 (Muscle Differentiation 1) promoter/enhancer regions were strongly expressed in HSMM (skeletal myoblast) cells; these too had a high likelihood of alignment with high identity to TEr within other critical genes of myogenesis (EXAMPLE 5). Astonishingly, TEr sequences from SRA1 lncRNA (required for retinoic acid-mediated neuronal cell differentiation) aligned to numerous genes associated with Parkinson's Disease (EXAMPLE 6), suggesting a new model of disease pathogenesis in which mis-regulation of TEr transcription leads to aberrant guidance of transcription effector-complexes between the genes that share them.

[0325] Other promoter-proximal non-TEr transcripts were also analyzed for genomic alignments. Antisense nonprocessive transcripts (NPTx; termed “promoter slippage”; EXAMPLE 7) are often considered “junk”. The transcribed antisense promoter sequences of NFkB1 were analyzed. They were found to have a high probability of aligning to genes encoding RNA-binding proteins required for RNA transcription, formation and packaging, as will be demonstrated (EXAMPLE 7).

[0326] Finally, hub gene TEr were examined in the stress-response pathway gene CRHR2 (receptor for stress-related hormone CRF; EXAMPLE 9) and in inflammatory pathway gene CD4+ (T_{H} immune cell activation, HIV binding; EXAMPLE 10). Again, the probability remained high that these TEr aligned to other genes within their specific pathways, as disclosed herein.

[0327] The present inventors are reporting, for the first time, that protein-to-protein interactive networks are mirrored in the genes that encode them, through the sharing of high identity variant TEr sequences. What is unique to the results presented herein is that they suggest individualized high identity remnant TEr sequences participate in beneficial transcriptional crosstalk irrespective of their subtype or “similar control regions” such as shared TFBS. Although many TEr may in fact be nonfunctional residues, these results predict that many more than the expected number of TEr provide a rate-limiting step for transcription elongation based on RNA-sequence mediated epigenetic regulation. In this model, the final transcription rate of a full-length mRNA is the summation of the rate at which each TEr is epigenetically (controlled in turn by the transcription rates of its siblings in trans) (FIG. 4a). This model of effector complexes guided between genes containing “sibling” TE predicts “neural-like” networks will naturally form (FIG. 4b).

[0328] The model also sheds light on a process whereby random distribution of TE siblings could result in highly specific gene networks. If, as already described, TE siblings integrate within genes for which transcriptional crosstalk becomes evolutionarily beneficial, their sequences are conserved. Subsequent random transposition events from one of these siblings (now the “parent”, FIG. 1) are once again conserved if their integration has further allowed beneficial crosstalk with the genes already sharing the high identity sequence (alreadyfunctionally-linked). If, following species divergence, the TE transposes again, the specific genes aligned would be different between the species, but again, the sequence would only be conserved if beneficial crosstalk occurred between already functionally-linked genes. This model would explain the highly conserved MIR remnant within the promoter of FAK/PTK2 (essential role in regulating cell migration, adhesion, spreading) of Human, Xenopus and Murine species that aligned to EMT-critical genes, but to different ones: Human MIR aligned between Wnt3/Wnt9B and to TCF7 (activates transcription through Wnt/beta-catenin signaling pathway) while Murine MIR aligned to FZD2 (Frizzled class Receptor 2; a Wnt receptor) and BARX1 (an endodermal Wnt suppressor) whereas Xenopus SINE2-1/MIR aligned only once within the full genome: to TRIM33 (tripartite motif containing 33; an inhibitor of TGF-beta-mediated EMT signaling) (FIG. 5).

[0329] Transcription factors are powerful machines of gene transcription regulation. Nevertheless, it is not well-understood how genes that coordinate specific biologic pathways “find” each other for co-regulation, and how DNA accessibility and transcription remains dynamic, yet gene-specific, within generally activated or inhibited microenvironments. Evolution has been prolific in taking advantage of the principles of nucleic acid complementarity that allows precision in RNA/DNA-mediated signaling and targeting of proteins. The present disclosure is based on results that suggest complex gene-to-gene communication networks have evolved through the simple repetition of nucleic acid sequence duplication and dispersal within the genome, amplified by transposons, over millions of years.

[0330] Finally, the inventors suggest that the dramatic expression and then silencing of TEr during gametogenesis and embryogenesis is not primarily an “immune-like” response “genomic parasites”. (Malone C D, Hannon G J. Small RNAs as Guardians of the Genome. 2009). PiRNA-PIWI complexes do not disturb or damage TEr sequences, they silence them temporarily. Many individual TEr are expressed in a controlled and cell-type specific way for unknown reasons. (Hall L L, Carone D M, Gomez A V, Kolpa H J, Byron M, Mehta N, et al. Stable C0T-1 repeat RNA is abundant and is associated with euchromatic interphase chromosomes. Cell. 2014; Carnevali D, Conti A, Pellegrini M, Dieci G. Whole-genome expression analysis of mammalian-wide interspersed repeat elements in human cell lines. DNA research: an international journal for rapid publication of reports on genes and genomes. 2017; Xie M, Hong C, Zhang B, Lowdon R F, Xing X, Li D, et al. DNA hypomethylation within specific transposable element families associates with tissue-specific enhancer landscape. Nature Genetics. 2013; Johnson J M, Edwards S, Shoemaker D, Schadt E E. Dark matter in the genome: Evidence of widespread transcription detected by microarray tiling experiments. 2005; Chishima T, Iwakiri J, Hamada M. Identification of transposable elements contributing to tissue-specific expression of long non-coding RNAs. Genes. 2018). Perhaps the advantages TEr have contributed to the evolution of multicellularity and tissue differentiation is conserved by piRNA/PIWI complexes, just silenced as the organism prepares to replicate—a single cell once again. (FIG. 6).

[0331] In summary, the common assumption that the small sequence variation that allows determination of the genomic position of a repetitive element is physiologically irrelevant “junk” was tested. Surprisingly, results suggest that protein-to-protein networks are mirrored by direct gene-to-gene networks between the genes that encode them, through the sharing of high identity “junk” DNA sequences. The unexpected specificity of this “junk” indicates its potential role in guidance of epigenetic chromatin-modifying complexes between functionally-linked genes by TEr-primed Argonautes and TEr-containing lncRNA. In addition, results suggest a new model of disease pathogenesis in which mis-regulation of TEr transcripts leads to aberrant guidance of transcription effector-complexes between the genes that share complementary partners, creating a transcription “network-opathy”. Results presented in this patent suggests this may be the case in certain forms of Parkinson's disease. In vitro data confirms the predictive value of the Method in designing a molecule that is a powerful modulator of epithelial to mesenchymal transition (EXAMPLE 4).

[0332] These NPtx and TEr sequences have not otherwise been classified as miRNA, piRNA, siRNA, eRNA or other RNA of known function. Shared high-identity sequences ranged in length from 20 bp to hundreds of base pairs. They were sometimes transcribed in cell-type specific patterns into small RNA fragments unrelated to transposition. They were often found in lncRNA. Alignments were not pericentromeric and rarely in 3′UTR of coding-genes. All TE families and subtypes were represented in percentages consistent with their reported frequency in the human genome.

[0333] Overall, the common assumption that the small sequence variation that allows determination of the genomic position of a repetitive element is physiologically irrelevant “junk” was tested. Surprisingly, results suggest that protein-to-protein networks are mirrored by direct gene-to-gene networks between the genes that encode them, through the sharing of high identity “junk” DNA sequences. The unexpected specificity of this “junk” indicates its potential role in guidance of epigenetic chromatin-modifying complexes between functionally-linked genes by TEr-primed Argonautes and TEr-containing lncRNA. In addition, results suggest a new model of disease pathogenesis in which mis-regulation of TEr transcripts leads to aberrant guidance of transcription effector-complexes between the genes that share complementary partners, creating a transcription “network-opathy”. Results presented in this patent suggests this may be the case in certain forms of Parkinson's disease. In vitro data confirms the predictive value of the Method in designing a molecule that is a powerful modulator of epithelial to mesenchymal transition.

[0334] These NPtx and TEr sequences have not otherwise been classified as miRNA, piRNA, siRNA, eRNA or other RNA of known function. Shared high-identity sequences ranged in length from 20 bp to hundreds of base pairs. They were sometimes transcribed in cell-type specific patterns into small RNA fragments unrelated to transposition. They were often found in lncRNA. Alignments were not pericentromeric and rarely in 3′UTR of coding-genes. All TE families and subtypes were represented in percentages consistent with their reported frequency in the human genome.

### Example 2: Identifying Gene Networks in Silico

[0335] In one example, the present invention includes a method by which gene networks are identified in silico.

[0336] In brief, the Method can be summarized as follows:

[0337] 1. Choose TEr or NPtx of interest. These include, but are not limited to, those within enhancer, promoter and promoter-proximal regions; 5′UTR, 3′UTR; Intron 1 proximal to the TSS; and/or NPtx, not otherwise annotated, in all regulatory regions and introns.

[0338] 2. Using a quality-controlled sequence alignment algorithm (BLAT, BLASTn), identify TEr and other high identity sequence with criteria allowing a high probability of high identity. For example, (but not restricted to): NCBI “BLASTn”-2013: Transcripts+top 15 intronic hits, E=0.0, % homology >75%; and/or UCSC Genome Browser: Duplicates >1000, Human Chain Sequence Alignments, “BLAT”-2013 top 20 hits, homology >75%.

[0339] 3. Sequences of highest identity are checked for genomic position. If they are within a gene regulatory region (intronic, promoter-proximal or enhancer to a coding or noncoding gene) the full function of that gene is tabulated, to the extent that it is known.

[0340] 4. The process is reiterated with TEr sequence found in cis to the original TEr.

[0341] 5. The process is reiterated with TEr sequences of genes thus connected to the index gene.

[0342] 6. Gene functional groups, identified by Steps 1-5, can be statistically compared to groups of genes identified using a different index gene. If the groups are significantly different, the index genes are members of different functional pathways.

[0343] METHOD in detail,
[0344] key pathway genes (Index Genes) and the TEr chosen from their transcriptional regulatory regions (Index TE) were chosen using the criteria listed in Table 1.

TABLE 1
Criteria for Index Gene and TEr selection
KEY PATHWAY GENE (INDEX GENE)
Critical to pathway of interest
“Hub” protein in signal transmission
Conserved
TEr SEQUENCES CHOSEN (INDEX TE)
Gene transcriptional regulatory regions
Transcribed
Conserved
Transcription Start Site (TSS) proximal
5′UTR
Promoter proximal intron 1
Adjacent to TEr of interest

[0345] For each Index Gene chosen, attention was focused initially on transcribed TEr, highly conserved TEr and their adjacent TEr (TE subtypes are described in detail elsewhere herein) (exemplified in FIG. 7). For Index Genes NFkB1 and MyoD1, TEr integrated within all transcriptional regulatory regions were analyzed including promoter (defined as up to 5kb from the transcription start site), enhancer (within 50kb of the promoter) and promoter-proximal Intron 1.

[0346] Using a quality-controlled sequence alignment algorithm, TEr alignments with the highest probability of high identity (as defined and ranked by the alignment algorithm of choice) are determined (FIG. 8). For example, (not the only possible criteria):

NCBI “BLASTn”: Transcripts+top intronic hits, chance the alignment is random (E)=significant=% homology>75%.

[0347] UCSC genome database BLAT2013 (GRCh38/hg38)(“BLAT2013”): top 10 alignments were chosen for experiments reported in this patent (exemplified in Table 2). BLAT on DNA is designed to find sequences of ≥95% similarity of length 25 bases or more, and perfect sequence matches of 20 bases (Kent W J. BLAT—The BLAST-Like Alignment Tool. Genome Research. 2002.) (FIG. 9; These aligned sequences are TEr “siblings” (as defined FIG. 1). Those claimed in this patent are termed “Core Template Sequences”.

TABLE 2
Example of top 10 BLAT₂₀₁₃ alignments of NFkB1 TEr sequence of
AluJr_{Zebrafish} of FIG. 7)

| | | | | Summary | |
|---|---|---|---|---|---|
| # | Location | Conservatn | Txn | Description | Gene |
| 1 | alignment | Zebrafish | — | | |
| | to self | | | | |
| 2 | ln 3/9 | Arm | +/−all | PHF11 Interacts with | PHF11 (ENST00000378319.7) |
| | | | | [symbol] and RELA, | |
| | | | | Highly expressed in T | |
| | | | | and B-cells | |
| | | | | SETDB2-PHF11 | DESCRIPTION: RecName: Full = PHD finger |
| | | | | naturally occurring | protein 11; AltName: Full = BRCA1 C-terminus- |
| | | | | readthrough | associated protein; AltName: Full = Renal |
| | | | | transcript | carcinoma antigen NY-REN-34; |
| | | | | [symbol] histone | FUNCTION: Positive regulator of Th1-type |
| | | | | methyltransferases | cytokine gene expression. |
| | | | | | SUBUNIT: Interacts with BRCA1 and RELA. |
| | ln 13/19 | | | | SETDB2-PHF11, SET2 = Tmethyl-CpG-binding |
| | | | | | domain (MBD) and a SET domain and function |
| | | | | | as histone methyltransferases. This protein is |
| | | | | | recruited to heterochromatin and plays a role |
| | | | | | in the regulation of chromosome segregation. |
| | | | | | This region is commonly deleted in chronic |
| | | | | | lymphocytic leukemia. Naturally-occuring |
| | | | | | readthrough transcription occurs from this |
| | | | | | gene to the downstream PHF11 (PHD finger |
| | | | | | protein 11) gene. Alternative splicing results |
| | | | | | in multiple transcript variants. [provided by |
| | | | | | RefSeq, Mar 2016] |
| | | | | | RefSeq: NR 135324.1 Status: Validated |
| | | | | | Description: SETDB2-PHF11 readthrough, |
| | | | | | transcript variant 2; This gene represents |
| | | | | | naturally-occurring readthrough transcription |
| | | | | | between the upstream SETDB2 (SET domain |
| | | | | | bifurcated 2) gene to the downstream PHF11 |
| | | | | | (PHD finger protein 11) gene. Readthrough |
| | | | | | transcripts may encode fusion proteins with |
| | | | | | similarity to proteins encoded by each of the |
| | | | | | individual genes or may encode candidates |
| | | | | | for nonsense-mediated decay |
| 3 | E | 5′Ferret/ | — | Interacts with GLUL = | PALMD (ENST00000263174.8) |
| | | 3′Arm | | biosynthesis of | |
| | | | | several amino acids, | |
| | | | | pyrimidines, and | |
| | | | | purine | |
| | | | | GLUL related | DESCRIPTION: RecName: Full = Palmdelphin; |
| | | | | pathways are TNFR1 | AltName: Full = Paralemnin-like protein; |
| | | | | Pathway | |
| | | | | Ubiquitous, | SUBUNIT: Interacts with GLUL (By similarity). |
| | | | | abundant in cardiac | |
| | | | | and skeletal muscle. | |
| | | | | | TISSUE SPECIFICITY: Ubiquitous. Most |
| | | | | | abundant in cardiac and skeletal muscle. |
| | | | | | GLUL (Glutamate-Ammonia Ligase) = catalyzes |
| | | | | | the production of glutamine and |
| | | | | | 4-aminobutanoate (gamma-aminobutyric acid, |
| | | | | | GABA) (Glutamine is an abundant amino acid, |
| | | | | | and is important to the biosynthesis of |
| | | | | | several amino acids, pyrimidines, and purine), |
| | | | | | Among GLUL related pathways are TNFR1 |
| | | | | | Pathway and Astrocytic Glutamate-Glutamine |
| | | | | | Uptake And Metabolism. Gene Ontology (GO) |
| | | | | | annotations related to this gene include |
| | | | | | identical protein binding and manganese ion |
| | | | | | binding. |
| 4 | ln 1/10 | Br Bat | +/−HEPG2 | may function in | FAM20A (ENST00000592554.1) |
| | sense | | | hematopoiesis. | |
| | ln 1/2 as | | | golgi associated | Description: Homo sapiens FAM20A, golgi |
| | | | | secretory pathway | associated secretory pathway pseudokinase |
| | | | | pseudokinase | (FAM20A), transcript variant 1, mRNA. (from |
| | | | | | RefSeq NM_017565) |
| | | | | | RefSeq Summary (NM_017565): This locus |
| | | | | | encodes a protein that is likely secreted and |
| | | | | | may function in hematopoiesis. |
| | | | | | DESCRIPTION: RecName: Full = Protein |
| | | | | | FAM20A; Flags: Precursor; |
| 5 | ln 2/13 | Manetee | ++HUV | bind to lipids such as | FNBP1L (ENST00000260506.12) |
| | | | EC, | phosphatidylinositol | |
| | | | HEPG2, | 4,5-bisphosphate | |
| | | | hESC, | (PIP2) | |
| | | | HSMM | promote membrane | DESCRIPTION: RecName: Full = Formin-binding |
| | | | | invagination and the | protein 1-like; AltName: Full = Transducer of |
| | | | | formation of tubules | Cdc42-dependent actin assembly protein 1; |
| | | | | | Short = Toca-1; |
| | | | | | FUNCTION: Required to coordinate |
| | | | | | membrane tubulation with reorganization of |
| | | | | | the actin cytoskeleton during endocytosis. |
| | | | | | May bind to lipids such as |
| | | | | | phosphatidylinositol 4,5-bisphosphate and |
| | | | | | phosphatidylserine and promote membrane |
| | | | | | invagination and the formation of tubules. |
| | | | | | Also promotes CDC42-induced actin |
| | | | | | polymerization by activating the WASL/ |
| | | | | | N-WASP-WASPIP/WIP complex, the |
| | | | | | predominant form of WASL/N-WASP in cells. |
| | | | | | Actin polymerization may promote the fission |
| | | | | | of membrane tubules to form endocytic |
| | | | | | vesicles. Essential for autophagy of |
| | | | | | intracellular bacterial pathogens. |
| 6 | ln 5/19 | Br Bat | — | endoproteolytic | PCSK5 (ENST00000545128.5) |
| | | | | processing for | |
| | | | | several integrin | |
| | | | | alpha subunits | |
| | | | | Expressed in | DESCRIPTION: RecName: Full = Proprotein |
| | | | | T-lymphocytes. | convertase subtilisin/kexin type 5; EC = 3.4.21.-; |
| | | | | | AltName: Full = Proprotein convertase 5; |
| | | | | | Short = PC5; AltName: Full = Proprotein |
| | | | | | convertase 6; Short = PC6; Short = hPC6; |
| | | | | | AltName: Full = Subtilisin/kexin-like protease |
| | | | | | PC5; Flags: Precursor; |
| | | | | | FUNCTION: Likely to represent a widespread |
| | | | | | endoprotease activity within the constitutive |
| | | | | | and regulated secretory pathway. Capable of |
| | | | | | cleavage at the RX(K/R)R consensus motif. |
| | | | | | Plays an essential role in pregnancy |
| | | | | | establishment by proteolytic activation of a |
| | | | | | number of important factors such as BMP2, |
| | | | | | CALD1 and alpha-integrins. |
| | | | | | TISSUE SPECIFICITY: Expressed in |
| | | | | | T-lymphocytes. |
| 7 | ln 5/8 | ard | ++++all | Essential component | SNAP23 (ENST00000249647.7) |
| | isoform | | | of high affinity | |
| | | | | receptor for the | |
| | | | | general membrane | |
| | | | | fusion machinery | |
| | 3′UTR | | | Cell membrane; | DESCRIPTION: RecName: Full = Synaptosomal- |
| | | | | Lipid-anchor. Cell | associated protein 23; Short = SNAP-23; |
| | | | | junction, synapse, | AltName: Full = Vesicle-membrane fusion |
| | | | | synaptosome | protein SNAP-23; |
| | | | | | FUNCTION: Essential component of the high |
| | | | | | affinity receptor for the general membrane |
| | | | | | fusion machinery and an important regulator |
| | | | | | of transport vesicle docking and fusion. |
| | | | | | SUBUNIT: Binds simultaneously to SNAPIN |
| | | | | | and SYN4. Found in a complex with VAMP8 |
| | | | | | and STX4 in pancreas. Interacts with STX1A |
| | | | | | and STX12 (By similarity). Binds tightly to |
| | | | | | multiple syntaxins and |
| | | | | | synaptobrevins/VAMPs. Found in a complex |
| | | | | | with VAMP8 and STX1A. |
| | | | | | TISSUE SPECIFICITY: Ubiquitous. Highest |
| | | | | | levels where found in placenta. |
| 8 | ln 1/31 | Guinea pig | ++GM78 | PI3K, classll with | PIK3C2A (RefSeq: NM_001321378.1) |
| | | | | calcium-dependent | |
| | | | | phospholipid binding | |
| | | | | motifs | |
| | | | | The PI3-kinase | Description: phosphatidylinositol-4-phosphate |
| | | | | activity of this | 3-kinase catalytic subunit type 2 |
| | | | | protein is not | alpha, transcript variant 2 |
| | | | | sensitive to | |
| | | | | nanomolar levels of | |
| | | | | the inhibitor | |
| | | | | wortmanin. | |
| | | | | activated by insulin | class II PI3-kinases. C2 domains act as |
| | | | | and may be involved | calcium-dependent phospholipid binding |
| | | | | in integrin-dependent | motifs that mediate translocation of proteins |
| | | | | signaling. | to membranes, and may also mediate |
| | | | | [provided by RefSeq, | protein-protein interactions. The PI3-kinase |
| | | | | July 2008]. | activity of this protein is not sensitive to |
| | | | | | nanomolar levels of the inhibitor wortmanin. |
| | | | | | This protein was shown to be able to be |
| | | | | | activated by insulin and may be involved in |
| | | | | | integrin-dependent signaling. [provided by |
| | | | | | RefSeq, July 2008]. |
| 9 | ln 3/17 | Chincilla | +/−all | Non-neuronal | MAP4 (ENST00000395734.7) |
| | | | | microtubule- | |
| | | | | associated protein. | |
| | | | | Promotes | |
| | | | | microtubule | |
| | | | | assembly | |
| | | | | | DESCRIPTION: RecName: Full = Microtubule- |
| | | | | | associated protein 4; Short = MAP-4; |
| | | | | | FUNCTION: Non-neuronal microtubule- |
| | | | | | associated protein. Promotes microtubule |
| | | | | | assembly. |
| | | | | | SUBUNIT: Interacts with SEPT2; this |
| | | | | | interaction impedes tubulin-binding. |
| 10 | ln 3/5 | arm | +++all | methylation of | DPY30 (ENST00000342166.9) |
| | | | | histone H3 at ‘Lys-4’, | |
| | | | | particularly | |
| | | | | trimethylation) = | |
| | | | | transcriptional | |
| | | | | activation | |
| | | | | subunit of the | DESCRIPTION: RecName: Full = Protein dpy-30 |
| | | | | [symbol] family of | homolog; AltName: Full = Dpy-30-like protein; |
| | | | | H3K4 | Short = Dpy-30L; |
| | | | | methyltransferases | |
| | | | | controls cell cycle | FUNCTION: As part of the MLL1/MLL |
| | | | | regulators, | complex, involved in the methylation of |
| | | | | proliferation and | histone H3 at ‘Lys-4’, particularly |
| | | | | differentiation of | trimethylation. Histone H3 ‘Lys-4’ methylation |
| | | | | hematopoietic | represents a specific tag for epigenetic |
| | | | | progenitor cells | transcriptional activation. May play some role |
| | | | | | in histone H3 acetylation. In a |
| | | | | | teratocarcinoma cell, plays a crucial role in |
| | | | | | retinoic acid-induced differentiation along the |
| | | | | | neural lineage, regulating gene induction and |
| | | | | | H3 ‘Lys-4’ methylation at key developmental |
| | | | | | loci. May also play an indirect or direct role in |
| | | | | | endosomal transport. |
| | | | | May play some role | SUBUNIT: Homodimer. Core component of |
| | | | | in histone H3 | several methyltransferase- containing |
| | | | | acetylation (Met and | complexes including MLL1/MLL, MLL2/3 (also |
| | | | | Ac?) | named ASCOM complex) and MLL4/WBP7. |
| | | | | | MEN1, HCFC1, HCFC2, NCOA6, KDM6A, |
| | | | | | PAXIP1/PTIP, PAGR1 and alpha- and beta- |
| | | | | | tubulin (By similarity). Interacts with ASH2L; |
| | | | | | the interaction is direct. Interacts with |
| | | | | | ARFGEF1. Component of the SET1 complex, at |
| | | | | | least composed of the catalytic subunit |
| | | | | | (SETD1A or SETD1B), WDR5, |
| | | | | crucial to retinoic | INTERACTION: Self; NbExp = 3; IntAct = |
| | | | | acid-induced | EBI-744973, EBI-744973; Q9UBL3:ASH2L; |
| | | | | differentiation along | NbExp = 5; IntAct = EBI-744973, EBI-540797; |
| | | | | the neural lineage | |

[0348] It will be understood that open-source algorithms such as BLAT2013 or BLASTn may be sometimes changed without notification. Therefore, the alignment rankings reported herein may differ between algorithms and may change over time; however, the overall pathway defined by genes aligned by the method disclosed herein remains the same.

[0349] The percent identity rankings differed between algorithms; however, it did not matter which algorithmic ranking system was used, human BLAT and BLASTn alignments ultimately converged on the same pathway.

[0350] The highest identity alignments (as defined above) were evaluated for genomic position and, if within the regulatory regions of a known gene, their function identified using Weismann Institute of Science database (“GeneCards.org”).

[0351] If alignments are within the regulatory regions of a coding or noncoding gene, the full function of that gene is tabulated, using a detailed gene database (e.g., GeneCard.com, Weismann Institute), to the extent that it is known. Functional Categories used herein are presented in FIGS. 8, 10 and Table 3.

[0352] The process is then repeated with TEr sequences found in cis.

[0353] To further expand the network, the Method can be repeated with TEr sequences of the functionally-grouped aligned genes thus creating a “neural-type” network (FIG. 4).

### Example 3: Bioinformatics Study

[0354] Genomic alignments were tested among computer-generated random sequences (N=50, 20nt each; generated using the sample function in the R language (R-project.org R-project.org). There were no alignments among them.

[0355] TEr selected randomly were then tested for genomic alignments (N=25; blinded selection) aligned with high-identity (top 10 BLAT₂₀₁₃ alignments) as per the Method. Not all random TEr (N=25) aligned 10 times within the genome, leading to 240 total genomic alignments (Table 3). Interestingly, random TEr tended to align within gene regulatory regions, consistent with previous observations that TEr positions are not randomly distributed.

TABLE 3
List of Functional categories and the Rates at Which Random TEr
Align to Genes Within Them

| | | | |
|---|---|---|---|
| RANDOM TEr | | 25 | |
| Total alignments | | 240 | |
| Intergenic (IG) | | 33 | 13.8% |
| alignments | | | |
| Gene alignments | | 207 | 86.3% |
| | lncRNA | 37 | 17.9% |
| | Unknown coding genes | 30 | 14.5% |
| | Known coding genes | 140 | 67.6% |
| Function of known | | | |
| coding genes | | | |
| | Growth Factor | 19 | 13.6% |
| | Transcription | 18 | 12.9% |
| | Metabolic | 17 | 12.1% |
| | Immune response | 12 | 8.6% |
| | Cell motility, cytoskeletal | 11 | 7.9% |
| | Mitosis | 9 | 6.4% |
| | Vesicle movement | 9 | 6.4% |
| | RNA biosynth, processing | 6 | 4.3% |
| | Neural specific | 6 | 4.3% |
| | mm/CVS, Angiogenesis | 5 | 3.6% |
| | Ubiquitin | 4 | 2.9% |
| | Sperm/Ovary specific | 4 | 2.9% |
| | Cell adhesion/gap junctions | 3 | 2.1% |
| | Stress Response | 3 | 2.1% |
| | Hormonal | 3 | 2.1% |
| | Voltage channels | 3 | 2.1% |
| | Developmental | 3 | 2.1% |
| | Coagulation | 2 | 1.4% |
| | Phospholipid Signaling | 1 | 0.7% |
| | Apoptosis | 1 | 0.7% |
| | Insulin, Alt, glucose | 1 | 0.7% |

[0356] A bioinformatics study was performed testing the hypothesis that TEs disperse high identity variant sequence to functionally grouped genes. The fraction of Index TEr alignments to genes of a specific function were compared between three biologic groups: Muscle/Cardiovascular system (mm/CVS), Developmental system (DEV) and Immune system (IS) (Table 4).

[0357] For each biologic system, 4 key genes (Index genes) were chosen to represent that system, and for each Index gene, 7 TEr chosen (Table 4).

TABLE 4
Summary of Bioinformatics study design

| | | #TE | Max BLAT | Max BLAT |
|---|---|---|---|---|
| System of | | per | alignments | alignments |
| Interest | Key Genes | gene | per TE | per system |
| Immune system | 1. GR | 7 | 10 | |
| | 2. CRHR2 | 7 | 10 | |
| | 3. NFκB | 7 | 10 | |
| | 4. TLR3 | 7 | 10 | 280 |
| Muscle/ | 1. MyoD | 7 | 10 | |
| Cardiovascular | 2. TPM1 | 7 | 10 | |
| | 3. CALDS | 7 | 10 | |
| | 4. CKM | 7 | 10 | 280 |
| Developmental | 1. Promoter region #1 | 7 | 10 | |
| | 2. Enhancer region #2 | 7 | 10 | |
| | 3. Enhancer region #3 | 7 | 10 | |
| | 4. Enhancer region #4 | 7 | 10 | 208 |

```
TEs (N = 7/gene)
4 key genes/system
3 biologic systems
  Muscle/Cardiovascular (mm/CVS)
  Immune System (IS)
  Development (DEV)
```

[0358] The summary of the statistical analysis is presented in FIG. 10. The fraction of index TEs positive for each function was compared between the three biologic groups with both parametric (t test with pooled variance) and nonparametric (Kruskal-Wallis) tests (Table 5). The match of the index TEr with itself was not included in calculations. P values are reported without correction for multiple comparisons.

TABLE 5
Results of Bioinformatics Study.

| | IS vs | | mm/CVS | | IS | |
|---|---|---|---|---|---|---|
| | mm/CVS | | vs DEV | | vs DEV | |
| | KW. | t. | KW. | t. | KW. | t. |
| FUNCTION | test | test | test | test | test | test |
| Skeletal, smooth muscle; Cardiovascular | 0.002 | 0.008 | 0.001 | 0.008 | 0.69 | 0.96 |
| Cytoskeleton (actin, microtubules, collagen) | 0.09 | 0.14 | 0.01 | 0.04 | 0.45 | 0.52 |
| Muscle/Cardiovascular + Cytoskeleton | 0.0002 | 0.002 | 0.00083 | 0.0 [symbol] 1 | 0.53 | 0.74 |
| Immune Response | 0.10 | 0.07 | 0.28 | 0.12 | 0.69 | 0.89 |
| Growth Factor pathway | 0.15 | 0.11 | 0.003 | 0.02 | 0.08 | 0.08 |
| Stress (heat, [symbol] , oxidative) | 0.97 | 0.70 | 0.54 | 0.54 | 0.52 | 0.40 |
| Immune + Stress | 0.08 | 0.11 | 0.22 | 0.19 | 0.63 | 0.88 |
| [symbol] ; Organogenesis [symbol] | 0.28 | 0.28 | 0.0 [symbol] | 0.02 | 0.003 | 0.007 |
| Transcription Factor | 0.34 | 0.39 | 0.95 | 0.96 | 0.31 | 0.3 [symbol] |
| [symbol] | 0.08 | 0.08 | 0. [symbol] | 0. [symbol] 4 | 0.73 | 0.73 |
| Mitosis [symbol] ; Cell Cycle Progression | 0.12 | 0.12 | 0.72 | 0.58 | 0.23 | 0.38 |
| Metabolic | 0.35 | 0.20 | 0.88 | 0.48 | 0.49 | 0.60 |
| AKT/PKB [symbol] Insulin Pathway | 1.00 | 1.00 | 0.56 | 0.52 | 0.56 | 0.52 |
| Phospholipid Signaling Pathway | 0.32 | 0.32 | 0.16 | 0.16 | 0.58 | 0.58 |
| Clotting; Compliment; Platelet pathways | 0.15 | 0.16 | all values 0 | NA | 0.15 | 0.15 |
| Gap Junctions; Adherens Junctions; Cadherin | 0.17 | 0.22 | 0.28 | 0.31 | 0.74 | 0.81 |
| Ion Exchange or Voltage Gated Channel | 0.33 | 0.79 | 0.96 | 0.52 | 0.2 [symbol] | 0.24 |
| Ca++ Responsive Signalling; C [symbol] Messenger | 0.30 | 0.31 | 0.07 | 0.07 | 0.31 | 0.31 |
| Golgi Traff [symbol] ing; Vessicle Formation; C [symbol] | 0.72 | 0.72 | 0.66 | 0.33 | 0.44 | 0.24 |
| GPCR Signaling, not otherwise specified | 1.00 | 1.00 | 0.15 | 0.15 | 0.15 | 0.15 |
| RNA Biosynthesis Pathways | 1.00 | 1.00 | 0.30 | 0.16 | 0.30 | 0.16 |
| DNA Damage Response | 0.30 | 0.28 | 0.59 | 0.55 | 0.5 [symbol] | 0.5 [symbol] |
| Apoptosis Pathway; Fas; B [symbol] | 0.15 | 0.16 | 0.65 | 0.49 | 0.08 | 0.10 |
| [symbol] Pathway | 0.32 | 0.32 | 0.32 | 0.33 | 0.08 | 0.08 |
| [symbol] and [symbol] -associated | 0.15 | 0.16 | all values 0 | NA | 0.15 | 0.15 |
| [symbol] genesis, [symbol] genesis | 0.69 | 0.69 | 0.96 | 0.96 | 0.65 | 0.66 |
| [symbol] RNA; Open Reading Frames; Unknown Function | 0. [symbol] 6 | 0. [symbol] 4 | 0.31 | 0.26 | 0.41 | 0.27 |

TEr of MyoD have a higher likelihood of aligning TE of genes of mm/CVS pathways
TEr of HOXA have a higher likelihood of aligning TE of genes of DEV pathways
TEr of hormone receptors have a higher likelihood of aligning TE of genes of hormonal pathways [symbol]
indicates data missing or illegible when filed

[0359] The trial was terminated at 4 Index genes/system and 7 Index TEr/gene (280 TEr maximal alignments per biologic system) when strong statistical significance became apparent (Table 5).

[0360] Unexpectedly, Index genes representing each biologic system had a high likelihood of sharing high-identity TEr (within the top ten BLAT₂₀₁₃ alignments) (Table 5). For example, contrary to expectation, TEr sequences from regulatory DNA of genes key to the Muscle/Cardiovascular (mm/CVS) and Developmental (DEV) biological pathways were significantly more likely to align with high-identity to genes participating in the same pathway as compared to the genes aligned by those of a different biologic pathway (FIG. 11, Table 5 second row). The choice of Immune System (IS) key genes included two hormone receptors activated by inflammation and stress (Glucocorticoid receptor and CRH Receptor 2) and the likelihood of the IS group of Index TEr aligning to genes participating in hormonal pathways was significantly higher than those of mm/CVS index TEr (P<0.04) or DEV index TEr (P<0.004). Other results unlikely to be random included examples of single genes targeted multiple times by Index TEr from a gene in the same biologic pathway and single Index TEr that aligned with high identity to multiple functionally-linked genes (described in detail in Examples below).

[0361] Index TEr of all three functional groups matched in similar fractions to all other functional categories (Table 5, row 11 onwards), including Immune function genes. The background rate of alignment of random TEr to Immune genes was high (8.6%; Table 3) as compared to the rate at which they aligned to mm/CVS or DEV genes (3.6% and 2.1% respectively).

[0362] Shared high-identity sequences ranged in length from 20 bp to hundreds of base pairs. They did not necessarily include transcription-factor binding sites and were often transcribed in cell-type specific patterns into RNA fragments unrelated to transposition. They were not classified as “miRNA”, “tRNA”, eRNA or “piRNA”. Alignments were not pericentromeric and rarely in 3′UTR of coding-genes. All TE families and subtypes were represented in percentages consistent with their reported frequency in the human genome.

[0363] In summary, key muscle/cardiovascular system genes were found to have a higher likelihood of aligning to Ter of other muscle genes. Key developmental genes were found to have a higher likelihood of aligning to Ter of other developmental genes. TEr of immune system genes were found to align equally between groups. Baseline rate of IS alignment using random TEr is high.

### Examples 4: TEr Alignments of Hub Genes

[0364] TEr alignments of pathway hub genes within different biologic systems were studied in greater detail with the in silico method (Table 6).

TABLE 6
Additional examples of hub genes tested for network
discovery using in silico method

| Ex: | Hub genes | Pathway |
|---|---|---|
| 3 | NFkB1 and its cis | 1. Phospholipid signaling- |
| | lncRNA_{LOC105377621/RP11-499E18.1} | mediated cell activation |
| | | 2. Epithelial to mesenchymal |
| | | transition (EMT) |
| | | In vitro data is presented |
| | | about the participation of |
| | | lncRNA_{LOC105377621/RP11-499E18.1} |
| | | TEr in EMT |
| 4 | MyoD1 and its cis | Myogenesis |
| | lncRNA_{AC124301.1} | |
| 5 | SRA1 lncRNA | Parkinson's disease |
| 6 | NFkB1 promoter NPtx and | RNA-binding proteins |
| | promoter ncRNA | required for RNA |
| | AF213884.2 | transcription, formation |
| | | and packaging |
| 7 | FAK/PTK2, b-Catenin | Epithelial to mesenchymal |
| | and Wnt | transition |
| 8 | CRHR2 | Stress-related lipid metabolism |
| 9 | CD4 | T_{H} immune cell activation, |
| | | HIV binding |

### Example 5: Nuclear Factor-Kappa B Subunit 1 (NFkB1) TEr and Genes Coordinating Cell Activation and Tumorigenesis

[0365] NFkBT is a 105 kD protein which undergoes cotranslational processing to produce a 50 kD protein which is the DNA binding subunit of the NF-kappa-B (NFKB) protein complex. Its most common partner is subunit p65: RELA. NFkB links signal transduction events initiated at the cell membrane by a vast array of stimuli (cytokines, oxidant-free radicals, bacterial/viral products), translocating the signal to the nucleus where it directly binds to genes that coordinate inflammation, immunity, differentiation, cell growth, tumorigenesis and apoptosis.

[0366] There was significant likelihood that TEr within NFkBT transcriptional regulatory regions share high-identity TEr with phospholipid signaling pathway-specific genes, an ancient pathway critical to the genes critical to the initiation of cell activation at the plasma membrane (FIGS. 12, 15, Table 7).

TABLE 7
Significant likelihood that the results are specific and non-random

| | | | |
|---|---|---|---|
| Index Gene | TEr | n/N | P value |

Likelihood that NFkB1 TEr align to Phospholipid
Signaling Pathway Genes

| | | | |
|---|---|---|---|
| NFkB | 41 | 17/367 | |
| Random TE | 25 | 1/240 | <0.003 |
| Hair genes Control | 28 | 2/270 | <0.004 |
| Housekeeping genes Control | 28 | 2/247 | <0.007 |

Likelihood that MyoD1 TEr align to
Muscle/Cardiovascular Pathway Genes

| | | | |
|---|---|---|---|
| MyoD1 | 46 | 48/446 | |
| Random TE | 25 | 5/240 | <0.00004 |
| Hair genes Control | 28 | 10/270 | <0.0008 |
| Housekeeping genes Control | 28 | 6/247 | <0.00009 |

n = # TEr alignments to specific pathway genes
N = Total TEr with high identity alignments
Abbreviations: NFkB1: Nuclear Factor Kappa B Subunit 1; a transcription factor that is the endpoint of a series of signal transduction events that are initiated by stimuli related to embryogenesis, oncogenesis, cell activation, inflammation, and cell growth. MyoD1: Myogenic Differentiation 1 promotes transcription of muscle-specific target genes and plays a role in muscle differentiation.

[0367] BLAT₂₀₁₃ analysis of promoter, promoter-proximal intron 1 and highly conserved enhancer TEr sequences of NFkB1 (N=41, Total alignments=367) revealed a significantly larger fraction of TEr sequences aligned with high-identity to genes of the Phospholipid-mediated signaling cascade (N=17) than did random TEr (P<0.003), Hair gene-specific TEr (P<0.004) or TEr of Housekeeping genes (P<0.007) (Table 7). This is in contrast to TEr of the key gene of muscle development MyoD1, with aligned with high likelihood to genes of the muscle/cardiovascular system.

[0368] The ancient Phospholipid Signaling Pathway is initiated by inflammatory and proliferative signals that activate cell membrane phospholipids, triggering immediate intracellular release of Ca²⁺ and the phosphorylation of effector proteins that activate NFkB1, (FIG. 12; outlined in FIG. 15). Multiple genes encoding isoforms of key proteins critical to the initiation of phospholipid signaling were aligned by NFkB TEr including PI3-Kinase (PI3K-C2A), Phospholipase A (PLA2G4A) and Phospholipase C (PLC-E1) (FIG. 12). TEr with high identity to genes of this pathway were present throughout KFkB1 transcriptional regulatory regions including its upstream lncRNA_{LOC105377621/RP11-499E18.1} (FIG. 13). Astonishingly, PLC-E1 was aligned by two different Alu Repeats in the promoter-proximal region of NFkB1 intron 1: AluYa5 and AluSz6 _{chr4:102507477-102507601} (which also aligned KSR2, see below). Index TEr aligned to three genes encoding enzyme isoforms responsible for Phosphatidic Acid (PA) metabolism to DAG (Diacylglycerol Kinase Iota, Kappa and Eta; DGKI, DGKK and DGKH; and aligned another gene of this same pathway twice: TAMM41 (Mitochondrial Translocator Assembly and Maintenance Homolog; catalyzes the reaction of PA to CDP-diacylglycerol (CDP-DAG) (FIG. 13). Interestingly, RELA/p65 (most common NFkB1/p50 subunit within the NFkB complex) contained a promoter TEr that also aligned to the DGK1 gene.

[0369] Other results unlikely to be random included five NFkB1 TEr sequences that align with high identity to four genes encoding key inhibitors of the Ras signal transduction pathway (critical molecular switch that turns on various target proteins necessary for cellular proliferation) (FIG. 13, 14). KSR2 (Kinase Suppressor of Ras 2) is aligned twice (FIG. 14). Interestingly, the “sibling” TEr within KSR2 further aligned to genes critical to the phospholipid signaling pathway (FIG. 15). The family of Ras proteins play a pivotal role in the regulation of cell proliferation and their activation is critical to downstream NFkB1-mediated pathway outcome and to cell oncogenic potential. Intron 1 TEr also aligned Neurofibromin 1 (NF1; negative regulator of the Ras signal transduction pathway) and both an enhancer and intron 1 TEr aligned KSR2 (FIG. 13). Kinase Suppressor of Ras 1 (KSR1: a MEK/RAF/RAS scaffold) was aligned by a conserved enhancer NFkB1 TEr, as was MAPKAP1 (subunit of nutrient-insensitive mTOR2, inhibits HRAS and KRAS) which, astonishingly, was directly adjacent to the KSR1-aligning TEr. In total, five NFkB1 index TEr sequences aligned to four genes encoding RAS inhibitors.

[0370] The first set of TEr following the NFkB1 5′UTR in intron 1 is especially interesting: not only do TEr aligning KSR2 and NF1 lie close together, this region contained several sequential TEr that aligned with high identity to genes critical to the initiation of EMT at the plasma membrane (FIG. 16). FIG. 16 also highlights the Adherens Junction, where genes essential to initiating and maintaining cell-cell contact are aligned by TEr of NFkBT, including both Formin 1 and 2 (FMN1, 2; essential for polymerization of linear actin cables; conserved to slime mold) as well as two of Formin's binding proteins (FNPB1 and FNPB1-L). Promoter-proximal intron 1 RNA sequences are transcribed soon after RNA polymerase II has begun mRNA elongation. While the 5′untranslated region (UTR; exon 1) forms secondary RNA structures required for mRNA capping and translation, the intronic region that follows is not known to participate in RNA-mediated signaling. Whether RNAs from these TEr sequences are physiologically active is may require additional investigation.

[0371] Importantly, there were several genes aligned by TEr of both NFkB1 enhancer/intron 1 TEr and lncRNA_{LOC105377621/RP11-499E18.1} TEr (FIG. 17; Table 8). For example, DAB1 (Disabled (Drosophila) Homolog 1) was aligned 3 times: twice by adjacent TEr of NFkB1 intron 1 and once by an exonic TEr of lncRNA_{LOC105377621/RP11-499E18.1} (FIG. 17; Table 8. DAB1 is activated upon the binding of Reelin, which is expressed most strongly in brain, blood and liver. It increases with liver damage, returning to normal following its repair, and it is elevated in aggressive pancreatic cancer.

TABLE 8
Exonic TEr of lncRNA_{LOC105377621/RP11-499E18.1} that aligned the same
genes as TEr from NFkB1 enhancer/intron 1

| | | |
|---|---|---|
| NFkB1 | | |
| Enh, intron 1 | lncRNA_{LOC105377621} | TEr-aligned Genes/Gene isoforms |

TEr alignments to same gene_{(TEr subscript to aligned gene)}

| | | |
|---|---|---|
| LTBP1 | LTBP1 | Latent-Transforming Growth Factor Beta-Binding Protein 1: controls TGF-beta activation |
| 12a to ln 3/33 | AluY to ln 5/33 | |
| DAB1 | DAB1 | Disabled (Drosophila) Homolog 1-Reelin Signal Transducer 1: |
| 1. MIR3 to Enh | AluSc, | Activated by the binding of Reelin (secreted by developing neurons, liver, pancreas) to |
| 2. MLT1A1 to | numerous | VLDLR and LRP8/APOER2; triggers activation of Src kinases, PI3K and Crk (cell |
| ln 2/14 | alignments | adhesion, spreading and migration). Loss of Reelin contributes to the ability of |
| | | pancreatic cancer cells to migrate and invade |
| PCDH9 | PCDH9 | Protocadherin-9: calcium-dependent cell-adhesion protein, involved in signaling at |
| L2a to ln 2/4 | AluY to ln 3/4 | neuronal synaptic junctions |
| MED13L | MED13L | Mediator complex subunit 13 like: transcriptional coactivator for most RNA polymerase |
| L1MD1 to | L1PA15 to Enh | II-transcribed genes (participates in enhancer clusters). This subunit may specifically |
| ln 2/30 | | regulate transcription of targets of the Wnt signaling pathway and SHH signaling pathway |

TEr alignments to Isoforms

| | | |
|---|---|---|
| FNBP1L | FNBP1 | Formin-binding protein 1 and FBP1-Like: binds PIP2 and Formin (aligned by two NFkB1 |
| (AluJr) | (AluSc) | enhancer TEr; conserved to slime mold, polymerization of linear actin cable in formation of |
| | | adherens junction, regulates the shape and position of the nucleus during cell migration) |
| PI3KCZA | PI3KC2B | Phosphatidylinositol-4-phosphate 3-kinase with C2 domain (Type II): key role in signaling |
| (AluJr) | (Alusc) | pathways involved in cell activation and proliferation, oncogenic transformation, cell |
| | | survival and cell migration |
| GPC6 | GPC5 | Glypican 5, 6: cell surface heparan sulfate proteoglycan coreceptors for growth factors. |
| (CTR81B) | (MLT1J) | Associated with Wnt signaling |

[0372] This convergence of TEr alignments to genes critical to the initiation of EMT led us to analyze the expression ofNFkB1 and lncRNA_{LOC105377621} isoforms (also termed RP11-499E18.1) in cancer cells. Using the public Gene Expression Omnibus high RNAseq profiling database, pancreatic adenocarcinoma cell lines were assayed for NFkB1 intron 1 and RP11-499E18.1 expression (GSE88759) (Barrett T, Wilhite S E, Ledoux P, Evangelista C, Kim I F, Tomashevsky M, et al. NCBI GEO: archive for functional genomics data sets-update. Nucleic Acids Research. 2012; 41(D1):D991-D5.) Both were expressed in a well differentiated (epithelial) pancreatic cancer cell line (BxPC3) and markedly decreased in a less differentiated (mesenchymal) cell line (S2-007/Suit2), suggesting their loss is associated with tumor progression (FIG. 18). In vitro analysis of RP11-499E18.1 was performed in PDA cell lines BxPC3, Suit2, Pancr1 and COLO357 (also associated with metastasis). RP11-499E18.1 is the UCSC term used for several isoforms, here distinguished as isoforms LOC621b and c; FIG. 19). Isoforms range in size from 608-673nt with LOC621c isoforms initiating with an AluY fragment and terminating in an MTL1J fragment. Depending on the isoform, 2 of 2, 3 of 3 or 3 of 4 exons consist of TEr sequences (FIG. 19). Genes to which these TEr sequences align within phospholipid signaling or EMT pathways are listed in FIG. 13.

[0373] SiRNA sequence was designed to the 3′ MTL1J. Knock down (KD) of RP11-499E18.1 resulted in dramatic phenotypic changes in all PDA cell lines (FIGS. 20-22). Following KD, the well differentiated epithelioid cell line BxPC3-KD exhibited morphologic changes from epithelioid to mesenchymal, (FIG. 20) as did Pancr1-KD. In contrast the highly aggressive cell line Suit2-KD transitioned from a mix of poorly-differentiated and spindling cells into small round cells with no apparent contact-inhibition (FIG. 21). COLO357-KD transitioned from predominantly nested epithelioid cells into ragged clusters of small round cells (FIG. 22). PCR analysis of COLO357-KD cells revealed a marked decrease in markers of both mesenchymal (CDH2, VIM, SNAI) and epithelial (CDH1) differentiation (Table 9). TGFb stimulation of COLO357-KD cells resulted in round cell enlargement and marked loss of cell-to-cell contact inhibition. These TGFb stimulated COLO357-KD showed a strong increase in the mesenchymal-cell marker VIM, but the cells did not show and increase in SNAI1 or the typical spindle pattern of EMT (FIG. 22). Interestingly, in TGFb controls, RP11-499E18.1 levels doubled over baseline, suggesting its participation in TGFb-stimulated cell responses; however, in its absence, the EMT-associated mesenchymal phenotype appeared to further de-differentiate, possibly into cancer stem cells.

TABLE 9
Fold changes in RNA expression (as compared to control)
of EMT Markers in COLO357 cells following
RP11-499E18.1 knock down and TGFb stimulation.

| | | siRNA | | | |
|---|---|---|---|---|---|
| | | − | − | + | + |
| | | TGFb | | | |
| | | − | + | − | + |
| | RP11-499E18.1 | 1 | 2.2 | 0.2 | 0.3 |
| Epithelial | CDH1 | 1 | 1.4 | 0.5 | 0.3 |
| Mesenchymal | CDH2 | 1 | 5.2 | 0.4 | 1.6 |
| | VIM | 1 | 18.9 | 0.8 | 17.7 |
| | SNAI1 | 1 | 1.7 | 0.5 | 0.4 |
| | ZEB1 | 1 | 1.4 | 1.2 | 1.3 |

Green = increased, Red = decreased, Purple = decreased with ratio of CDH2:CDH1 consistent with EMT transition

[0374] The full identity of the small round cells seen in Suit2 and COLO357 following RP11-499E18.1 siRNA awaits RNAseq results (pending). However, the decrease of both epithelial and mesenchymal cell markers suggests a transition to—(or selection for—) a cancer stem-cell type. The potent de-differentiation effects seen with the loss of this single small lncRNA, which consists predominantly of TEr that align genes of EMT, suggest that RP11-499E18.1 is behaving like a molecule required for maintenance of cell differentiation; in its absence, well differentiated epithelioid tumors transition into mesenchymal and poorly differentiated tumors completely de-differentiate. Results of RP11-499E18.1 overexpression experiments are pending.

[0375] Our findings in pancreatic adenocarcinoma cell lines differed somewhat from those of Yang et al, who report that RP11-499E18.1 expression is decreased in ovarian cancer tissue associated with rapid progression. (Yang J, Peng S, Zhang K. LncRNA RP11-499E18.1 Inhibits Proliferation, Migration, and Epithelial-Mesenchymal Transition Process of Ovarian Cancer Cells by Dissociating PAK2-SOX2 Interaction. Front Cell Dev Biol. 2021; 9:697831.) RP11-499E18.1 knock down in OC cells increased cell proliferation, migration, colony formation, and EMT transformation, and RP11-499E18.1 overexpression reversed these effects. (Yang J, Peng S, Zhang K. LncRNA RP11-499E18.1 Inhibits Proliferation, Migration, and Epithelial-Mesenchymal Transition Process of Ovarian Cancer Cells by Dissociating PAK2-SOX2 Interaction. Front Cell Dev Biol. 2021; 9:697831.) These authors do not note the dramatic change in cell morphology that we found in our more poorly-differentiated cell lines following knock down. In OC cells, the kinase Pak2 was shown to bind RP11-499E18.1, suggesting to the authors that interference with Pak2-SOX2 interaction in the cytoplasm inhibited EMT transition. The underlying hypothesis of RP11-499E18.1 mechanism of action is focused on potential chromatin-modifying effects, which is quite different than that of Yang et al, although the models are not mutually exclusive.

### Example 6: Myoblast Determination Protein (MyoD1) TEr and Muscle/Cardiovascular Genes

[0376] The alignment to pathway-specific genes of TEr of key genes and their cis lncRNA was further tested in detail using TEr of MyoD1 (major role in regulating muscle differentiation) and its upstream lncRNA_{RP11-358H18.3} (FIG. 23). MyoD1 promoter and 3′ enhancer contain numerous TEr than are strongly transcribed in muscle cell (myoblast) tissue culture, as is lncRNA_{RP11-358H18.3} (FIG. 23) Bioinformatics analysis of these TEr revealed a significantly high number of alignments to other genes of the muscle/cardiovascular system (P<0.00004 vs random TE; P<0.0008 vs hair gene controls; P<0.00009 vs housekeeping genes) (Table 7). An astonishing number of alignments were to genes of myogenesis, and often the same TEr would align 2 or more genes required for muscle development or maintenance (FIG. 23). For example, highly conserved MIRc in exon 2 (of 3) of lncRNA_{RP11-358H18.3} aligned with high-identity to both CDON1 (a mediator of cell-cell interactions specifically between muscle precursor cells) and to VIP (critical protein of cardiac muscle contraction and vasodilation (FIG. 23). These results suggest that TEr sequence in lncRNA participate in the trans localization of lncRNA to genes of the same pathway as those targeted by the TEr of its associated coding-gene and imply the specificity of the reaction is due to lncRNA nucleotide sequences such as exonic TEr.

### Example 7: Steroid Receptor RNA Activator 1 (SRA1) TEr and Genes Associated with Parkinson's Disease

[0377] In contrast to protein coding genes, 83% of lncRNAs contain a TE, and TEs comprise 42% of lncRNA sequences. (Kapusta A, Kronenberg Z, Lynch V J, Zhuo X, Ramsay L A, Bourque G, et al. Transposable Elements Are Major Contributors to the Origin, Diversification, and Regulation of Vertebrate Long Noncoding RNAs. PLoS Genetics. 2013; Alfeghaly C, Sanchez A, Rouget R, Thuillier Q, Igel-Bourguignon V, Marchand V, et al. Implication of repeat insertion domains in the trans-activity of the long non-coding RNA ANRIL. Nucleic Acids Research. 2021; 49(9):4954-70.) SRA1 is a lncRNA that scaffold's hormone receptors such as Retinoic Acid Receptor (required for neurogenesis). Transcription is initiated from a L2b that forms the first half of exon 1 (FIG. 24). Surprisingly, this L2 fragment had a high likelihood of aligning genes associated with Parkinson's Disease (Table 10). Parkinson's Disease (PD) is a disorder that affects movement. The etiology of PD is unknown, although multiple genes and proteins have been identified at abnormal levels in diseased tissue. These results suggest a new model of PD pathogenesis based on aberrant transcriptional network signaling, rather than malfunction of a single gene or protein.

TABLE 10
Genes associated with Parkinson's Disease aligned by the L2-TEr sequence
initiating SRA1 lncRNA

| | Aligned | |
|---|---|---|
| | Gene | Function |
| 1 | STX18-AS1 | antisense to Syntaxin (depolarization of the presynaptic axonal boutons). |
| | | STX1B and STX6 are associated with PD |
| 2 | PRKN | Parkinson Protein 2, E3 Ubiquitin Protein Ligase, targets substrate proteins for |
| | | proteasomal degradation, first gene identified as associated with PD |
| 3 | FILIP1 | filamin A interacting protein 1,. promotes filamin A degradation; role in cortical |
| | | neuron migration and dendritic spine morphology, associated with PD |
| 4 | PLA2G2C | Secretory Phospholipase A2 Group IIC. Secretory PLA2 is involved in LPA production |
| | (aligned | (lysophosphatidic acid; involved in neural development; activates microglial cells). |
| | again by | PLA2-G6 is associated with adult-onset dystonia-parkinsonism; PLA2G1B and PLA2G10 |
| | SRA1 | are differentially expressed in the substantia nigra of PD patients |
| | intron 2 | |
| | L2a | |
| 5 | OTUD3 | deubiquitinase OTUB1 is amyloidogenic, neurotoxic and forms inclusions with |
| | | α-synuclein (Lewy bodies) in rotenone-induced mouse model of PD |
| 6 | SYT6 | synaptotagmin 6. Highest median expression in basal ganglia, Ca2+ dependent |
| | | exocytosis of vesicles. Synaptotagmin interacts directly with PRKN |
| 7 | IGSF21 | immunoglobin superfamily member 21, synaptic inhibition through interactions with |
| | | NRXN2 (neuronal cell adhesion molecule down regulated in PD) |

### Example 8: NFkB1 Promoter Non-Processive “Junk” Transcripts and Genes Participating in Formation, Processing, Packaging and Function of mRNA

[0378] TEr are not the only “junk” found at the promoter. Bidirectional promoter transcripts are often considered “Promoter Slippage”. Although nascent RNA sequencing reveals widespread pausing and divergent initiation at human promoters, a function for these nonprocessive transcripts (NPtx) is unknown (FIG. 25). (Core L J, Waterfall J J, Lis J T. Nascent RNA sequencing reveals widespread pausing and divergent initiation at human promoters. Science. 2008.) The in silico method indicated that there is a significant likelihood that NFkB1 “promoter slippage” NPtx and lncRNA AF213884.2 share high-identity TEr within genes encoding RNA-binding proteins participating in formation, processing, packaging and function of mRNA (Table 11).

[0379] The presence of these conserved and transcribed “promoter slippage” sequences within the promoter of NFkB1 suggest that, 1) Transcription Factors are not always bound to active promoter regions, allowing antisense transcription to occur; and 2) there is potential for RNA-mediated transcriptional crosstalk between the NFkB1 promoter non-TE sequences and genes that code for RNA-binding proteins critical to RNA elongation and transport.

TABLE 11
Significant likelihood that NFKB1 promoter slippage NPtx
and IncRNA AF213884.2 share high-identity
TEr within RNA-binding protein genes

| AF213884.2 (479bp) | | | | | Promoter Slippage NPtx | | | | |
|---|---|---|---|---|---|---|---|---|---|
| Aligned | Gene | Region | Summary | Definition | Aligned | Gene | Region | Summary | Definition |
| 1* | TMEFF2 | 5′UT [symbol] | ERK1/2 | Transmembrane Protein | 1 | NFkB1 | Pro | NFkB | NFkB1 promoter |
| | | | phos- | With EGF Like And Two | | NPtx | | | nonprocessive |
| | | | phorylation | Follistatin Like Domains | | | | | transcripts |
| | | | | 2, Both an oncogene and | 2 | RBM15 | In 1/2 | RNA | RNA Binding |
| | | | | a tumor suppressor, | | | | binding | Motif Protein |
| | | | | proteolytic shedding | | | | | 15, mediates N6- |
| | | | | induced by TNFa promotes | | | | | methyladenosine |
| | | | | ERK1/2 phosphorylation | | | | | (m6A) methylation |
| 2* | hnRNP-L | 5′UT [symbol] | RNA | Heterogeneous nuclear | | | | | of RNAs, a |
| | | | binding | ribonucleoprotein L, | | | | | modification that |
| | | | | stably associated with | | | | | plays a role in the |
| | | | | hnRNP complexes, a major | | | | | efficiency of |
| | | | | role in the formation, | | | | | mRNA splicing |
| | | | | packaging, processing, | | | | | and RNA |
| | | | | and function of mRNA | | | | | processing |
| 3 | CFC1 | In 3/4 | patterning | Cripto, FAL-1, cryptic | | | | | |
| | | | the left-right | family 1, involved | 3 | AC022634.2 | Enh | unknown | [symbol] ncRNA |
| | | | embryonic | in signaling during | | | | function | |
| | | | axis | embryonic development | 4 | RPL3 | Pro | RNA | Ribosomal |
| 4* | Intragenic | | Transposable | Tigger6a range chr11: | | | | binding | Protein L3, HIV-1 |
| | | | Element | 127658493-127658843 | | | | | TAR RNA- |
| 5 | MEF2C- | In 5/5 | Transcription | Antisense to Myocyte | | | | | Binding Protein B |
| | AS1 | | Factor for | Enhancer 2C MEF2C, | 5 | VTRNA3- | Pro | Vault | Vault RNA 3-1 |
| | | | muscle | role in maintaining the | | 1P | | RNA | Pseudogene, vault |
| | | | differentiation | differentiated state of | | | | associaed | RNAs are |
| | | | | muscle cells | | | | with | polymerase |
| 6 | LOC10798 | In 2/3 | unknown | IncRNA | | | | ribo- | III transcripts |
| | 4606 | | function | | | | | nucleo- | associated with |
| 7* | ATF7IP | 5′UT [symbol] | couples' | Activating transcription | | | | proteins | ribonucleoproteins |
| | | | transcriptional | factor 7 interacting | | | | | involved in |
| | | | factors to | protein, modulates | | | | | nucleocytoplasmic |
| | | | general | transcription regulation | | | | | transport processes |
| | | | transcription | and chromatin | 6 | BIRC3 | In 1/2 | NFKB | Baculoviral IAP |
| | | | apparatus | formation | | | | signaling | Repeat Containing |
| | | | | | | | | | 3, E3 |
| 8* | ENST0000 | 5′UT [symbol] | Unknown | Unprocessed pseudogene | | | | | ubiquitin-protein |
| | 0568980.1 | | | | | | | | ligase regulating |
| | | | | | | | | | NF-kappa-B |
| | | | | | | | | | signaling |
| | | | | | 7 | Intergenic | | | |

[symbol]

indicates data missing or illegible when filed

### Example 9: Hub Genes of Epithelial to Mesenchymal Transition (EMT) Align with High Frequency to Other Hub Genes of EMT

[0380] It is still unclear what specific signals induce EMT in carcinoma cells. Abnormal proliferation and apoptosis may originate from “multiple hits” within a stem cell or from signals in the tumor stroma. The canonical EMT pathway is initiated by Wnt (or Wnt/β-catenin pathway) and/or activation of Focal Adhesion Kinase (FAK, a.k.a Protein Tyrosine Kinase 2, PTK2) (FIG. 26). These proteins play an essential role in regulating cell migration, adhesion, spreading, reorganization of the actin cytoskeleton, formation and disassembly of focal adhesions and cell protrusions, cell cycle progression, cell proliferation and apoptosis. The canonical Wnt pathway triggers a cytoplasmic accumulation of b-catenin which then translocats into the nucleus where it binds directly to the TCF/LEF family of transcriptional activators (FIG. 26).

[0381] It was discovered that FAK contains a Transcription Start Site (TSS)-proximal MIRc that aligned both Wnt 3/9B and TCF7, a finding highly unlikely to be random (FIG. 26). In turn, b-Catenin itself contained promoter and TSS-proximal TEr that aligned with high sequence identities to genes required for Wnt signaling, including a lncRNA that modulates the abundance of b-Catenin itself (FIG. 27). Unlikely to be random included the finding that both b-Catenin and Wnt10B/Wnt1 promoters contained TEr that aligned Ser/Thr phosphatases shifts the binding of TCF/LEF/b-Catenin complex from CBP to P300, shifting the Wnt- signaling pathway between pluripotency and differentiation. (Wnt signaling pathway and pluripotency; wikipathways.org) (FIGS. 27, 28). In addition, critical EMT pathway genes aligned by promoter TEr of FAK, b-Catenin, Wnt10B,1 and Wnt2 participate in the regulation of SNAIL (involved in induction of the epithelial to mesenchymal transition (EMT), formation and maintenance of embryonic mesoderm, growth arrest, survival and cell migration) (FIG. 29).

### Example 10: Corticotropin Releasing Hormone Receptor 2 (CRHR2) TEr and Genes of Stress-Related Lipid Metabolism

[0382] CRHR2 coordinates the endocrine, autonomic and behavioral responses to stress and immune challenge. The in silico method indicated that CRHR2 intron 1 MER21C aligns a gene network that participates in endocrine-mediated lipid metabolism and adipogenesis. The protein: protein interactions within this pathway is confirmed by the STRING database (https://string-db.org) (FIG. 30).

### Example 11: T-Cell Surface Glycoprotein CD4 TEr and Genes of Immune Cells and HIV Binding

[0383] T-Cell Surface Glycoprotein CD4, a coreceptor with the T-cell receptor on T lymphocytes, recognizes antigens displayed by antigen presenting cells in the context of class II MHC molecules. It is expressed not only in T lymphocytes, but also in B cells, macrophages, granulocytes, as well as in various regions of the brain, to initiate or augment the early phase of T-cell activation. It is the primary receptor for human immunodeficiency virus-1 (HIV-1). The in silico method indicated that the L2 TEr adjacent to the CD4 promoter transcription start site aligned with high identity to ACKR3, a coreceptor of HIV and NLRC5, a regulator of NFkB and Type 1 Interferon signaling (important for host defense against viruses; Table 12). Interestingly, it also aligned KCNMA1 (potassium channel with role in controlling cell excitability in innate immunity) and a subunit of KCNMA1: LRC38 (potassium channel associated with lymph node carcinoma) (Table 12).

TABLE 12
CD4 transcription start site proximal L2b top 10 alignments

| Hit# | Location | Conser | Expression | Summary | Name | Description |
|---|---|---|---|---|---|---|
| 1 | Pro | Arm | +/−hESC | match to self | CD4 | |
| | | | | | (ENST00000011653.8) | |
| 2 | In 2/29 | Arm | — | voltage and | KCNMA1 | |
| | | | | ca++sensitive | (ENST00000404771.7) | |
| | | | | potassium | | |
| | | | | channels: | | |
| | | | | smooth | | |
| | | | | muscle, | | |
| | | | | neuronal | | |
| | | | | excitability | | |
| | | | | | | Description: The sequence shown here is derived from an |
| | | | | | | Ensembl automatic analysis pipeline and should be |
| | | | | | | considered as preliminary data. (from UniProt Q5SVJ8) |
| | | | | | | RefSeq Summary (NM_001014797): MaxiK channels are |
| | | | | | | large conductance, voltage and calcium-sensitive potassium |
| | | | | | | channels which are fundamental to the control of smooth |
| | | | | | | muscle tone and neuronal excitability. MaxiK channels can |
| | | | | | | be formed by 2 subunits: the pore-forming alpha subunit, |
| | | | | | | which is the product of this gene, and the modulatory beta |
| | | | | | | subunit. Intracellular calcium regulates the physical |
| | | | | | | association between the alpha and beta subunit |
| 3 | In/Ex | Plat | 3+GM78 | regulator of | NLRC5 | |
| | (48/49) | 200mya | | the NF- | (ENST00000262510.10) | |
| | | | | kappa-B and | | |
| | | | | type I | | |
| | | | | interferon | | |
| | | | | signaling | | |
| | | | 3+HELA | homeostatic | | Description: Probable regulator of the NF-kappa-B and type I |
| | | | | control of | | interferon signaling pathways. May also regulate the type II |
| | | | | innate | | interferon signaling pathway. Plays a role in homeostatic |
| | | | | immunity | | control of innate immunity and in antiviral defense |
| | | | | and in | | mechanisms. (from UniProt Q86WI3) |
| | | | | antiviral | | |
| | | | | defense | | |
| | | | | mechanisms | | |
| | | | 2+NHLF | inhibition | | |
| | | | | NFKB | | |
| | | | | activation, | | |
| | | | | negative | | |
| | | | | regulation of | | |
| | | | | type I | | |
| | | | | interferon | | |
| | | | | signaling | | |
| | | | 2+HUVEC | | | |
| | | | 2+HSMM | | | |
| | | | 2+NHEK | | | |
| | | | −HepG2 | | | |
| | | | −K562 | | | |
| | | | −ESC | | | |
| 4 | In 1/27 | Arm | +/−GM78 | B-TFIID | BTAF1 | |
| | | | | TATA-box | (ENST00000265990.10) | |
| | | | | binding | D | |
| | | | | drives the | | Description: Homo sapiens B-TFIID TATA-box binding |
| | | | | dissociation | | protein associated factor 1 (BTAF1), mRNA. (from RefSeq |
| | | | | of TBP from | | NM_003972) |
| | | | | DNA | | |
| | | | | | | RefSeq Summary (NM_003972): This gene encodes a TAF |
| | | | | | | (TATA box-binding protein-associated factor), which |
| | | | | | | associates with TBP (TATA box-binding protein) to form the |
| | | | | | | B-TFIID complex that is required for transcription initiation |
| | | | | | | of genes by RNA polymerase II. This TAF has DNA- |
| | | | | | | dependent ATPase activity, which drives the |
| | | | | | | dissociation of TBP from DNA, freeing the TBP to |
| | | | | | | associate with other TATA boxes or TATA-less |
| | | | | | | promoters. [provided by RefSeq, September 2011] |
| 5 | IG | HedgHog | +/−HSMM | | IG | |
| 6 | IG | Aard | — | | IG | |
| 7 | In 13/17 | Arm/ | — | organizes the | SDCCAG8 | |
| | | TasDev | | centrosome | (ENST00000366541.7) | |
| | | | | during | | |
| | | | | interphase | | |
| | | | | and mitosis. | | |
| | | | | | | Description: Homo sapiens serologically defined colon |
| | | | | | | cancer antigen 8 (SDCCAG8), mRNA. (from RefSeq |
| | | | | | | NM_006642) |
| | | | | | | RefSeq Summary (NM_006642): This gene encodes a |
| | | | | | | centrosome associated protein. This protein may be involved |
| | | | | | | in organizing the centrosome during interphase and mitosis. |
| | | | | | | Mutations in this gene are associated with retinal-renal |
| | | | | | | ciliopathy. |
| 8 | Pro | X. Trop | — | collagen type | COL20A1 | |
| | | | | XX | (ENST00000358894.10) | |
| | | | | | | Description: Homo sapiens collagen type XX alpha 1 |
| | | | | | | (COL20A1), mRNA. (from RefSeq NM_020882) |
| | | | | | | a Protein Coding gene. Among its related pathways are |
| | | | | | | Phospholipase-C Pathway and Collagen chain trimerization. |
| | | | | | | An important paralog of this gene is COL14A1. |
| | | | | | | SUBCELLULAR LOCATION: Secreted, extracellular space |
| | | | | | | (Probable). |
| | | | | | | TISSUE SPECIFICITY: High expression in heart, lung, liver, |
| | | | | | | skeletal muscle, kidney, pancreas, spleen, testis, ovary, |
| | | | | | | subthalamic nucleus and fetal liver. Weak expression in |
| | | | | | | other tissues tested. |
| 9 | ~45kb 3′ | Arm | — | Along with | ACKR3 | |
| | | | | CD4, | (ENST00000272928.3) | |
| | | | | coreceptorwith | | |
| | | | | CXCR4 for | | |
| | | | | HIV | | |
| | | | | G-protein | | Description: Homo sapiens atypical chemokine receptor 3 |
| | | | | coupled | | (ACKR3), mRNA. (from RefSeq NM_020311) |
| | | | | receptor | | |
| | | | | family, | | |
| | | | | Atypical | | |
| | | | | chemokine | | |
| | | | | receptor (no | | |
| | | | | known | | |
| | | | | ligand) | | |
| | | | | | | RefSeq Summary (NM_020311): This gene encodes a |
| | | | | | | member of the G-protein coupled receptor family. Although |
| | | | | | | this protein was earlier thought to be a receptor for |
| | | | | | | vasoactive intestinal peptide (VIP), it is now considered to be |
| | | | | | | an orphan receptor, in that its endogenous ligand has not |
| | | | | | | been identified. The protein is also a coreceptor for human |
| | | | | | | immunodeficiency viruses (HIV). |
| | | | | | | Atypical chemokine receptor that controls chemokine levels |
| | | | | | | and localization via high-affinity chemokine binding that is |
| | | | | | | uncoupled from classic ligand-driven signal transduction |
| | | | | | | cascades, resulting instead in chemokine sequestration, |
| | | | | | | degradation, or transcytosis. Also known as interceptor |
| | | | | | | (internalizing receptor) or chemokine-scavenging receptor or |
| | | | | | | chemokine decoy receptor. Acts as a receptor for |
| | | | | | | chemokines CXCL11 and CXCL12/SDF1. Chemokine binding |
| | | | | | | does not activate G-protein-mediated signal transduction |
| | | | | | | but instead induces beta-arrestin recruitment, leading to |
| | | | | | | ligand internalization and activation of MAPK signaling |
| | | | | | | pathway. Required for regulation of CXCR4 protein levels in |
| | | | | | | migrating interneurons, thereby adapting their chemokine |
| | | | | | | responsiveness. In glioma cells, transduces signals via |
| | | | | | | MEK/ERK pathway, mediating resistance to apoptosis. |
| | | | | | | Promotes cell growth and survival. Not involved in cell |
| | | | | | | migration, adhesion or proliferation of normal |
| | | | | | | hematopoietic progenitors but activated by CXCL11 in |
| | | | | | | malignant hemapoietic cells, leading to phosphorylation of |
| | | | | | | ERK1/2 (MAPK3/MAPK1) and enhanced cell adhesion and |
| | | | | | | migration. Plays a regulatory role in CXCR4-mediated |
| | | | | | | activation of cell surface integrins by CXCL12. Required for |
| | | | | | | heart valve development. Acts as coreceptor with CXCR4 for |
| | | | | | | a restricted number of HIV isolates. |
| | | | | | | Acts as coreceptor with CXCR4 for a restricted number of |
| | | | | | | HIV isolates. |
| 10 | In 1/1 | Arm | — | Leucine-rich | LRRC38 | |
| | | | | repeat- | (ENST00000376085.4) | |
| | | | | containing | | |
| | | | | protein 38 | | |
| | | | | Auxiliary | | DESCRIPTION: RecName: Full = Leucine-rich repeat- |
| | | | | protein of | | containing protein 38; AltName: Full = BK channel |
| | | | | voltage and | | auxilliary gamma subunit LRRC38; Flags: Precursor; |
| | | | | ca++activated | | |
| | | | | potassium | | |
| | | | | channel | | |
| | | | | SUBUNIT: | | FUNCTION: Auxiliary protein of the large-conductance, |
| | | | | Interacts | | voltage and calcium-activated potassium channel (BK alpha). |
| | | | | with | | Modulates gating properties by producing a marked shift in |
| | | | | KCNMA1 | | the BK channel's voltage dependence of activation in the |
| | | | | (alignment | | hyperpolarizing direction, and in the absence of calcium. |
| | | | | #2) | | |

### FURTHER CONSIDERATIONS

[0384] In some embodiments, any of the clauses herein may depend from any one of the independent clauses or any one of the dependent clauses. In one aspect, any of the clauses (e.g., dependent or independent clauses) may be combined with any other one or more clauses (e.g., dependent or independent clauses). In one aspect, a claim may include some or all of the words (e.g., steps, operations, means or components) recited in a clause, a sentence, a phrase or a paragraph. In one aspect, a claim may include some or all of the words recited in one or more clauses, sentences, phrases or paragraphs. In one aspect, some of the words in each of the clauses, sentences, phrases or paragraphs may be removed. In one aspect, additional words or elements may be added to a clause, a sentence, a phrase or a paragraph. In one aspect, the subject technology may be implemented without utilizing some of the components, elements, functions or operations described herein. In one aspect, the subject technology may be implemented utilizing additional components, elements, functions or operations.

[0385] The subject technology is illustrated, for example, according to various aspects described below. Various examples of aspects of the subject technology are described as numbered clauses (1, 2, 3, etc.) for convenience. These are provided as examples and do not limit the subject technology. It is noted that any of the dependent clauses may be combined in any combination, and placed into a respective independent clause, e.g., clause 1 or clause 5. The other clauses can be presented in a similar manner.

[0386] Clause 1. The use of one or more Transposable Element remnant (TEr) nucleic acid sequences and promoter and promoter-proximal non-processive transcripts (NPtx) sequences of pathway hub genes and/or their associated (in cis or trans) lncRNA, to augment, alter, block or otherwise modify the transcription of genes that contain high identity (but not necessarily identical) nucleic acid sequences.

[0387] Clause 2. A method to identify the DNA sequences of Clause 1.

[0388] Clause 3. Specific nucleic acid sequences that can be utilized to block, disrupt or augment one or more of the following pathways: 1) epithelial to mesenchymal transition, 2) phospholipid signaling pathway, 3) myogenesis, 4) Parkinson's Disease-associated pathways, 5) stress-mediated fat metabolism, 6) CD4+ T cell activation and HIV binding, wherein the nucleic acid sequences have sequence identifiers from SEQ ID NO:1-SEQ ID NO:3918.

[0389] Clause 4. The nucleic acid sequences of Clause 3, modified by the addition of nuclear localization signals and/or “bar codes” and/or other nucleic acid identifiers and/or other synthetic modifiers.

[0390] Clause 5. A composition comprising a nucleic acid sequences of Clauses 3 or 4, and delivery molecule comprising viral vectors, nanoparticles or extracellular vesicles.

[0391] Clause 6. The use of sequences of Clause 3 as diagnostic or prognostic tools.

[0392] Clause 7. The use of sequences of Clause 3 to define a tumor or disease “signature”.

[0393] Clause 8. The use of sequences of Clause 3 for inhibition of epithelial to mesenchymal transition and/or maintaining tumor heterogeneity.

[0394] Clause 7. The use of sequences Clause 3 for the identification of cell function-specific pathways and/or for staging specific differentiation or developmental stages in cells, tissue and/or tissue samples.

[0395] Clause 8. The use of sequences Clause 3 to trigger or modify stem cells to differentiate into a tissue and/or cell type-of-interest and/or inducing specific differentiation or developmental stages in cells, tissue and/or tissue samples.

[0396] Clause 9. The use of TEr/NPtx-specific stands that are discovered by “pulled down” techniques, including but not restricted to Chromatin Immunoprecipitation for example, for the further identification of a specific genomic pathway or network.

[0397] Clause 10. A synthetic nucleic acid comprising one or more of a transposon remnant, a promoter and/or a promoter-proximal non-processive transcript, selected to modulate gene-to-gene transcriptional signaling within a given functional pathway.

[0398] Clause 11. The synthetic nucleic acid of Clause 10, to further modulate transcription of a plurality of genes within a network.

[0399] Clause 12. The synthetic nucleic acid of any of Clause 10-11, wherein the synthetic nucleic acid has a sequence that aligns with high identity to transcriptional regulatory regions of genes participating in the given functional pathway.

[0400] Clause 13. The synthetic nucleic acid of any of Clauses 10-12, wherein high identity is defined based on high identity BLAT₂₀₁₃ alignment, or other “in silico” genomic alignment algorithm

[0401] Clause 14. The synthetic nucleic acid of any of Clauses 10-13, further comprising nuclear localization signals and/or “bar codes” and/or other nucleic acid identifiers and/or other synthetic modifiers.

[0402] Clause 15. The synthetic nucleic acid of any of Clause 10-14, wherein the given functional pathway is selected from the group consisting of epithelial to mesenchymal transition pathway, phospholipid signaling pathway, myogenesis pathway, stress-mediated fat metabolism pathway, CD4+ T-cell activation and HIV binding pathway, and a Parkinson's Disease-associated pathway.

[0403] Clause 16. A method of modulating epigenetic communication between genes coordinating specific pathways, the method comprising:
[0404] delivering one or more synthetic nucleic acids as in any of Clause 10-15 to a sample of cells and/or a tissue and/or an animal model of disease and/or a human clinical trial.

[0405] Clause 17. The method of Clause 16, wherein delivering the one or more synthetic nucleic acids comprises delivery a delivery vehicle comprising the one or more nucleic acids, and nanoparticles or extracellular vesicles.

[0406] Clause 18. The method of any of Clauses 16-17, wherein modulating the epigenetic communication between genes coordinating specific pathways comprises ablate, inhibit or augment the transcription, translation or expression of one or more of functionally-linked genes.

[0407] Clause 19. The method of any of Clauses 16-18, further comprising determining a set of functionally-linked genes.

[0408] Clause 20. The method of any of Clauses 16-19, wherein determining the set of functionally-linked genes comprises:
[0409] (a) selecting a transposon remnant, a promoter, or a promoter-proximal non-processive transcript of a first index gene from a given functional pathway;
[0410] (b) identifying, using a computer implemented sequence alignment algorithm implemented by a processor, transposon remnant sequences from a set of genes, having a high homology/identity with the selected transposon remnant, promoter, or promoter-proximal non-processive transcript;
[0411] (c) determining, by the processor, a genomic position of the transposon remnant sequences with highest sequence identity with the selected transposon remnant, promoter, or promoter-proximal non-processive transcript;
[0412] (d) in response to a determination that the genomic position of a given identified transposon remnant sequence is within a gene regulatory region of a first gene among the set of genes, tabulating, by the processor, function of the first gene;
[0413] (e) repeating (a)-(d) for identified transposon remnant sequences that are in cis to the selected transposon remnant, promoter, or promoter-proximal non-processive transcript to determine transposon remnant sequences of genes connected to the first index gene; and
[0414] (f) repeating (a)-(e) with transposon remnant sequences of genes, among the set of genes, connected to the first index gene to determine a group of genes forming the given functional pathway.

[0415] Clause 21. The method of any of Clauses 16-20, further comprising: (g) repeating (a)-(f) for a second index gene.

[0416] Clause 22. A method of determining a network of genes, the method comprising the steps of:
[0417] (a) selecting a transposon remnant, a promoter, or a promoter-proximal non-processive transcript of a first index gene from a given functional pathway;
[0418] (b) identifying, using a computer implemented sequence alignment algorithm implemented by a processor, transposon remnant sequences from a set of genes, having at least 75% homology with the selected transposon remnant, promoter, or promoter-proximal non-processive transcript;
[0419] (c) determining, by the processor, a genomic position of the transposon remnant sequences with highest sequence identity with the selected transposon remnant, promoter, or promoter-proximal non-processive transcript;
[0420] (d) in response to a determination that the genomic position of a given identified transposon remnant sequence is within a gene regulatory region of a first gene among the set of genes, tabulating, by the processor, function of the first gene;
[0421] (e) repeating (a)-(d) for identified transposon remnant sequences that are in cis to the selected transposon remnant, promoter, or promoter-proximal non-processive transcript to determine transposon remnant sequences of genes connected to the first index gene; and
[0422] (f) repeating (a)-(e) with transposon remnant sequences of genes, among the set of genes, connected to the first index gene to determine a group of genes forming the given functional pathway.

[0423] Clause 23. The method of Clause 22, further comprising: (g) repeating (a)-(f) for a second index gene.

[0424] Clause 24. The method of any of Clauses 22-23, wherein in response to a determination that the group of genes determined for the second index gene is different from the group of genes for the first index gene, determining that second index gene is from a functional pathway different from that of the given functional pathway.

[0425] Clause 25. The method of any of Clauses 22-24, wherein the selected transposon remnant, promoter, or promoter-proximal non-processive transcript includes one or more of a from one or more of a transcribed transposon remnant, an ancient transposon remnant, a conserved transposon remnant, a promoter region, an enhancer region, promoter-proximal region, 5′ untranslated region; 3′ untranslated region, a first intron proximal to a transcription start site, and a non-processive transcript region in regulator region or a first intron proximal to a promoter.

[0426] Clause 26. The method of any of Clauses 22-25, wherein the first index gene is selected from 2013 UCSC genome or other human genome database.

[0427] Clause 27. The method of any of Clauses 22-26, wherein the computer implemented sequence alignment algorithm is BLAT 2013 or other genomic alignment algorithm.

[0428] Clause 28. The method of any of Clauses 22-27, wherein the given functional pathway is selected from the group consisting of: epithelial to mesenchymal transition pathway, phospholipid signaling pathway, myogenesis pathway, stress-mediated fat metabolism pathway, CD4+ T-cell activation and HIV binding pathway, and a Parkinson's Disease-associated pathway.

[0429] Clause 29. The method of any of Clause 22-28, wherein identifying transposon remnant sequences from a set of genes comprises identifying transposon remnant sequences having high homology/identity with the selected transposon remnant, promoter, or promoter-proximal non-processive transcript.

[0430] Clause 30. A method for inducing specific differentiation or developmental stages in cells, the method comprising:
[0431] determining a group of genes forming a given functional pathway using the method of any of Clauses 22-29;
[0432] delivering one or more synthetic nucleic acids comprising one or more of a transposon remnant, a promoter and/or a promoter-proximal non-processive transcript, and selected to modulate gene-to-gene transcriptional signaling within the given functional pathway,
[0433] wherein the given functional pathway is associated with the specific differentiation or developmental stages in cells.

[0434] Clause 31. The method of Clause 30, wherein the one or more synthetic nucleic acids have a sequence that aligns with high identity to transcriptional regulatory regions of genes participating in the given functional pathway.

[0435] Clause 32. The method of any of Clauses 30-31, wherein high identity is defined based on BLAT₂₀₁₃ or other genomic alignment algorithm.

[0436] Clause 33. The method of any of Clauses 30-32, wherein the synthetic nucleic acid has a sequence selected from top ten or more BLAT₂₀₁₃ alignments.

[0437] Clause 34. The method of any of Clauses 30-33, wherein the one or more synthetic nucleic acids further comprise nuclear localization signals and/or “bar codes” and/or other nucleic acid identifiers and/or other synthetic modifiers.

[0438] Clause 35. The method of any of Clauses 30-34, wherein delivering the one or more synthetic nucleic acids comprises delivery a delivery vehicle comprising the one or more nucleic acids, and nanoparticles or extracellular vesicles or other delivery vehicle.

[0439] Clause 36. The method of any of Clauses 30-35, further comprising modulating the epigenetic communication between the group of genes forming the given functional pathway.

[0440] Clause 37. The method of any of Clauses 30-36, wherein modulating the epigenetic communication comprises one or more of ablating, inhibiting or augmenting the transcription, translation or expression of one or more of functionally-linked genes.

[0441] Clause 38. The method of any of Clauses 30-37, further comprises delivering the Transposable Element remnant (TEr) nucleic acid sequences and promoter and promoter-proximal non-processive transcripts (NPtx) sequences of pathway hub genes and/or their associated (in cis or trans) lncRNA, to augment, alter, block or otherwise modify the transcription of genes that contain high identity nucleic acid sequences being selected to ablate, inhibit or augment the transcription, translation or expression of one or more of functionally-linked genes.

[0442] Clause 39. The method of any of Clause 30-38, further comprising delivering an oligonucleotide selected to ablate, inhibit or augment the transcription, translation or expression of one or more of functionally-linked genes.

[0443] Clause 40. A method to identify the DNA sequences of Clause 1 employing any of the steps of any of the preceding claims.

[0444] The foregoing description is provided to enable a person skilled in the art to practice the various configurations described herein. While the invention has been particularly described with reference to the various figures and configurations, it should be understood that these are for illustration purposes only and should not be taken as limiting the scope of the invention.

[0445] There may be many other ways to implement the invention. Various functions and elements described herein may be partitioned differently from those shown without departing from the scope of the invention. Various modifications to these configurations will be readily apparent to those skilled in the art, and generic principles defined herein may be applied to other configurations. Thus, many changes and modifications may be made to the invention, by one having ordinary skill in the art, without departing from the scope of the invention.

[0446] It is understood that the specific order or hierarchy of steps in the processes disclosed is an illustration of exemplary approaches. Based upon design preferences, it is understood that the specific order or hierarchy of steps in the processes may be rearranged. Some of the steps may be performed simultaneously. The accompanying method claims present elements of the various steps in a sample order, and are not meant to be limited to the specific order or hierarchy presented.

[0447] As used herein, the phrase “at least one of” preceding a series of items, with the term “and” or “or” to separate any of the items, modifies the list as a whole, rather than each member of the list (i.e., each item). The phrase “at least one of” does not require selection of at least one of each item listed; rather, the phrase allows a meaning that includes at least one of any one of the items, and/or at least one of any combination of the items, and/or at least one of each of the items. By way of example, the phrases “at least one of A, B, and C” or “at least one of A, B, or C” each refer to only A, only B, or only C; any combination of A, B, and C; and/or at least one of each of A, B, and C.

[0448] Furthermore, to the extent that the term “include,” “have,” or the like is used in the description or the claims, such term is intended to be inclusive in a manner similar to the term “comprise” as “comprise” is interpreted when employed as a transitional word in a claim.

[0449] A reference to an element in the singular is not intended to mean “one and only one” unless specifically stated, but rather “one or more.” Pronouns in the masculine (e.g., his) include the feminine and neuter gender (e.g., her and its) and vice versa. The term “some” refers to one or more. Underlined and/or italicized headings and subheadings are used for convenience only, do not limit the invention, and are not referred to in connection with the interpretation of the description of the invention. All structural and functional equivalents to the elements of the various configurations described throughout this disclosure that are known or later come to be known to those of ordinary skill in the art are expressly incorporated herein by reference and intended to be encompassed by the invention. Moreover, nothing disclosed herein is intended to be dedicated to the public regardless of whether such disclosure is explicitly recited in the above description.

1. A single- or double-stranded synthetic nucleic acid, comprising a transposon remnant sequence, a promoter non-processive transcript sequence and/or a promoter-proximal non-processive transcript sequence, wherein the transposon remnant is a transposon that is no longer capable of transposition, wherein the synthetic nucleic acid augments, alters or blocks transcription of one or more genes containing high identity DNA sequences thereby modulating gene-to-gene transcriptional signaling within a given functional pathway.

2. The synthetic nucleic acid of claim 1, wherein the one or more genes containing high identity nucleic acid sequences are among a group of genes forming the given functional pathway.

3. The synthetic nucleic acid of claim 2, wherein the synthetic nucleic acid has a sequence that aligns with high identity to transcriptional regulatory regions of genes participating in the given functional pathway.

4. The synthetic nucleic acid of claim 3, wherein high identity is defined based on high identity BLAT₂₀₁₃ alignment, or other “in silico” genomic alignment algorithm

5. The synthetic nucleic acid of claim 2, further comprising nuclear localization signals and/or “bar codes” and/or other nucleic acid identifiers and/or other synthetic modifiers.

6. The synthetic nucleic acid of claim 2, wherein the given functional pathway is selected from the group consisting of: epithelial to mesenchymal transition pathway, phospholipid signaling pathway, myogenesis pathway, stress-mediated fat metabolism pathway, CD4+ T-cell activation and HIV binding pathway, and a Parkinson's Disease-associated pathway.

7.-42. (canceled)

43. The synthetic nucleic acid of claim 1, wherein the transposon remnant sequence is not otherwise functional as a transcription factor binding site, primer binding site, small RNA of previously defined function or coding sequence.

The application's sequence listing, which the Patent Office published only in electronic form, follows.

SEQUENCE LISTING (4076 sequences)

SEQ ID NO: 1 - DNA, 50 bp, synthetic construct
  source 1..50: mol_type = other DNA
accatggaatactactcagccgtgaaaaaggaacaaaataatggcatttg

SEQ ID NO: 2 - DNA, 50 bp, synthetic construct
  source 1..50: mol_type = other DNA
ctgcaacatggctggaattggagaccattattctaagtgaagtaactcag

SEQ ID NO: 3 - DNA, 50 bp, synthetic construct
  source 1..50: mol_type = other DNA
aaagagaaaaccaaatatcacatgttcccactcatctgtgggagctaaac

SEQ ID NO: 4 - DNA, 50 bp, synthetic construct
  source 1..50: mol_type = other DNA
tctttggatgcaaaggcataagaatgatacattggactttggggacttgg

SEQ ID NO: 5 - DNA, 50 bp, synthetic construct
  source 1..50: mol_type = other DNA
gggaaagggtggggggtgacaagggataaaagactacacattgataaagt

SEQ ID NO: 6 - DNA, 50 bp, synthetic construct
  source 1..50: mol_type = other DNA
gtacactgctcaggtgatgggtgcaccaaaatcccagaaatcaccactga

SEQ ID NO: 7 - DNA, 55 bp, synthetic construct
  source 1..55: mol_type = other DNA
agaaattattcatgtaaccaaacaccacctgttcccccaaaacctattaaaataa

SEQ ID NO: 8 - DNA, 50 bp, synthetic construct
  source 1..50: mol_type = other DNA
aatcaaccatcgcattagatttaaataattgttgtaagtttggttgtaaa

SEQ ID NO: 9 - DNA, 50 bp, synthetic construct
  source 1..50: mol_type = other DNA
aatgaaatgcaaacattggaaattgttcttaaaagaagacagtggaaaaa

SEQ ID NO: 10 - DNA, 50 bp, synthetic construct
  source 1..50: mol_type = other DNA
ctacatatagaatcaaatcacattaatgtggatctgaatgtccagataac

SEQ ID NO: 11 - DNA, 50 bp, synthetic construct
  source 1..50: mol_type = other DNA
atgaagaaagactatgactaagtgagaaaaatgtgaactgggagaaagca

SEQ ID NO: 12 - DNA, 50 bp, synthetic construct
  source 1..50: mol_type = other DNA
aaaagatagttactttttaaaatcttatgtgaaagttagtaaagaatgaa

SEQ ID NO: 13 - DNA, 50 bp, synthetic construct
  source 1..50: mol_type = other DNA
aaagaataatttttaaacactaatatcaatagaacttaaaagagagttga

SEQ ID NO: 14 - DNA, 50 bp, synthetic construct
  source 1..50: mol_type = other DNA
tatcttccaaagctgcagaagataaaatcaacccaaagagcaaatgacag

SEQ ID NO: 15 - DNA, 50 bp, synthetic construct
  source 1..50: mol_type = other DNA
aaaacagaggaagtggcatagaaacctgaaaaatagaaagaaaacagcaa

SEQ ID NO: 16 - DNA, 50 bp, synthetic construct
  source 1..50: mol_type = other DNA
gaaagaaaaaagaaacaatacccgcagatagcataacaacacaaatgata

SEQ ID NO: 17 - DNA, 50 bp, synthetic construct
  source 1..50: mol_type = other DNA
tcagtcctgataataaatttaaatgagttatactacccagttaaaacaga

SEQ ID NO: 18 - DNA, 50 bp, synthetic construct
  source 1..50: mol_type = other DNA
gttctccaaatatggttaaaaaacaactgcttaaaaaacctttgctgctt

SEQ ID NO: 19 - DNA, 23 bp, synthetic construct
  source 1..23: mol_type = other DNA
ccaaaaagcacatctaaaacaaa

SEQ ID NO: 20 - DNA, 50 bp, synthetic construct
  source 1..50: mol_type = other DNA
gccaggcatagtggcatgcacctgtgttcccagctacttgggtggctgag

SEQ ID NO: 21 - DNA, 50 bp, synthetic construct
  source 1..50: mol_type = other DNA
gtgggaggcttgagcctgggaggttaaggcggcagtgagctaagattgta

SEQ ID NO: 22 - DNA, 50 bp, synthetic construct
  source 1..50: mol_type = other DNA
ccactgcactacagcctgggcaacagagcaagaacctgtctcaaaaaaga

SEQ ID NO: 23 - DNA, 21 bp, synthetic construct
  source 1..21: mol_type = other DNA
aaaaaaaaaaaaaaaagaaaa

SEQ ID NO: 24 - DNA, 50 bp, synthetic construct
  source 1..50: mol_type = other DNA
ggctgggcacagtgactcacacctgtaatcccagtactttgggaggtcaa

SEQ ID NO: 25 - DNA, 50 bp, synthetic construct
  source 1..50: mol_type = other DNA
ggcaggaggatcacttaagaccaggagtccaagaccagcttgagcaacaa

SEQ ID NO: 26 - DNA, 21 bp, synthetic construct
  source 1..21: mol_type = other DNA
attgagaccctgtctctacaa

SEQ ID NO: 27 - DNA, 50 bp, synthetic construct
  source 1..50: mol_type = other DNA
ccaccatcattcttcacagagttagaaaaaacaatcctcaaattcatatg

SEQ ID NO: 28 - DNA, 50 bp, synthetic construct
  source 1..50: mol_type = other DNA
gaaccaaaaaggaacccacatagccaaagcaagactaagcaaaaagaaca

SEQ ID NO: 29 - DNA, 50 bp, synthetic construct
  source 1..50: mol_type = other DNA
aatctggaggcatcacaattacctgacttcaaactatattctaaggccat

SEQ ID NO: 30 - DNA, 50 bp, synthetic construct
  source 1..50: mol_type = other DNA
agtcaccaaaacagcatggtactgatataaaaataggcacatagaccaat

SEQ ID NO: 31 - DNA, 50 bp, synthetic construct
  source 1..50: mol_type = other DNA
ggaacagaatagagaacccagaaatagagccaaatacttacagtcaactg

SEQ ID NO: 32 - DNA, 50 bp, synthetic construct
  source 1..50: mol_type = other DNA
attttcagcaaagcaaacaaaaacataaaacggggaaaggacaccctatt

SEQ ID NO: 33 - DNA, 50 bp, synthetic construct
  source 1..50: mol_type = other DNA
caacagatggtcctgggataattggcaagccccatgtagaagactaaatc

SEQ ID NO: 34 - DNA, 50 bp, synthetic construct
  source 1..50: mol_type = other DNA
tggatcctcacctgtcaccctatacaaaaatcaactcaagatggatcaaa

SEQ ID NO: 35 - DNA, 50 bp, synthetic construct
  source 1..50: mol_type = other DNA
gtcttaaatctaaaacctgaaaccataaagattctagaagataacaccag

SEQ ID NO: 36 - DNA, 50 bp, synthetic construct
  source 1..50: mol_type = other DNA
aaaaacccttctacacattggcttaggcaaagacttcatgatcaagaacc

SEQ ID NO: 37 - DNA, 50 bp, synthetic construct
  source 1..50: mol_type = other DNA
caaaagcaaatgcaacaaaaacaaagataaatagatgggacttaattaaa

SEQ ID NO: 38 - DNA, 50 bp, synthetic construct
  source 1..50: mol_type = other DNA
gtaaaaagcttctgcacagcaaaagaaataatcagcagggttaacataac

SEQ ID NO: 39 - DNA, 50 bp, synthetic construct
  source 1..50: mol_type = other DNA
caacagagtggaagaaaatcctcatctatccatctgacaaagaactaata

SEQ ID NO: 40 - DNA, 50 bp, synthetic construct
  source 1..50: mol_type = other DNA
tccagaatctacaaagaactcaaacaaatcagcaagaaaaaatgaacaat

SEQ ID NO: 41 - DNA, 50 bp, synthetic construct
  source 1..50: mol_type = other DNA
cccatcaaaaagtgggctaaggatgtgaatagacaattctcaaaagatga

SEQ ID NO: 42 - DNA, 50 bp, synthetic construct
  source 1..50: mol_type = other DNA
tatacaaatggccaacaagcatatggaaaatgctcagcatcactaattat

SEQ ID NO: 43 - DNA, 50 bp, synthetic construct
  source 1..50: mol_type = other DNA
cagaaaaactcaagtcaaaaccacaatgtgataccacctcactcctgcaa

SEQ ID NO: 44 - DNA, 50 bp, synthetic construct
  source 1..50: mol_type = other DNA
gaatggccataatcaaaaaataatagatgttggcatggatgtggtgaaaa

SEQ ID NO: 45 - DNA, 50 bp, synthetic construct
  source 1..50: mol_type = other DNA
gggaagacttttacactgttgattggaatataaactggtacaaccactgt

SEQ ID NO: 46 - DNA, 50 bp, synthetic construct
  source 1..50: mol_type = other DNA
ggaaaacagtgtggagattccctaaagaactaaaagtagatctaccactt

SEQ ID NO: 47 - DNA, 50 bp, synthetic construct
  source 1..50: mol_type = other DNA
gatccagcaatcccactactaggtatttacccagaggaaaataagtcatt

SEQ ID NO: 48 - DNA, 50 bp, synthetic construct
  source 1..50: mol_type = other DNA
atacaaaaaagatacttgcacacacatgtttatagcagtgcaatttgcaa

SEQ ID NO: 49 - DNA, 67 bp, synthetic construct
  source 1..67: mol_type = other DNA
ttgcaaaaatgtggaaccagcccaaatgcccatcaatcaacgagtggataaagaaaatttaatatat

SEQ ID NO: 50 - DNA, 50 bp, synthetic construct
  source 1..50: mol_type = other DNA
atggaagatatcacaaccaataccaaagaaatatgaaagtatattcaagg

SEQ ID NO: 51 - DNA, 50 bp, synthetic construct
  source 1..50: mol_type = other DNA
cttctatgaacacctttacatgcataatgtagaaaacctagaagagatgg

SEQ ID NO: 52 - DNA, 50 bp, synthetic construct
  source 1..50: mol_type = other DNA
ataaatttctggaaatttatcctagattaaaccaggaagatatagaaaca

SEQ ID NO: 53 - DNA, 50 bp, synthetic construct
  source 1..50: mol_type = other DNA
ctgaacagaccaataacaagaagcaagattgaaatggttaaaaaaaatgc

SEQ ID NO: 54 - DNA, 50 bp, synthetic construct
  source 1..50: mol_type = other DNA
caataaaaatagtccaggaccagaaggattcacagctgaattctatcagg

SEQ ID NO: 55 - DNA, 50 bp, synthetic construct
  source 1..50: mol_type = other DNA
cattcaaagaagaattggtaccaatcctactgacactattccaaaagata

SEQ ID NO: 56 - DNA, 50 bp, synthetic construct
  source 1..50: mol_type = other DNA
gagaaagaggaaattttccctaagtcattctatgaagtcagcatcaccct

SEQ ID NO: 57 - DNA, 50 bp, synthetic construct
  source 1..50: mol_type = other DNA
tataccagaaccaggaagggacacaacaaaaaaagaaaactatagaccaa

SEQ ID NO: 58 - DNA, 50 bp, synthetic construct
  source 1..50: mol_type = other DNA
tatccctgatgaacatagatgcaaaagtcctcaacaaaatactagtgagc

SEQ ID NO: 59 - DNA, 50 bp, synthetic construct
  source 1..50: mol_type = other DNA
caaatccaacagcatatcaaaaagataatccaccatgatcaactgggttt

SEQ ID NO: 60 - DNA, 50 bp, synthetic construct
  source 1..50: mol_type = other DNA
cagaccagggatgcagggatggtttaacataggcaagtcaataactgtga

SEQ ID NO: 61 - DNA, 50 bp, synthetic construct
  source 1..50: mol_type = other DNA
tacaccacacaaacagaattaaaaacaaaaatcacatgatcatctcaaga

SEQ ID NO: 62 - DNA, 50 bp, synthetic construct
  source 1..50: mol_type = other DNA
gacacagaaaaagcatttgacgaaatccagcatccttttatgattaaaac

SEQ ID NO: 63 - DNA, 50 bp, synthetic construct
  source 1..50: mol_type = other DNA
cctcagcaaaattggcacagaagagacatgccttaaggtaataaaagcca

SEQ ID NO: 64 - DNA, 50 bp, synthetic construct
  source 1..50: mol_type = other DNA
cctgcgagaaacccacagccaacattatactgaatggggaaaagtttaaa

SEQ ID NO: 65 - DNA, 50 bp, synthetic construct
  source 1..50: mol_type = other DNA
acattccccctgaaaactggaacaagacaaggatgcccactttcaccact

SEQ ID NO: 66 - DNA, 50 bp, synthetic construct
  source 1..50: mol_type = other DNA
tctagttaacatagcactggaagtcctagacagagcaatcagacaagaga

SEQ ID NO: 67 - DNA, 50 bp, synthetic construct
  source 1..50: mol_type = other DNA
aagaaataaagggcatccaaatcagtaaagaggaagtcaaactgtcactg

SEQ ID NO: 68 - DNA, 50 bp, synthetic construct
  source 1..50: mol_type = other DNA
tttgctgatgatatgatcgtatacctagaaaaccctaaagacatatccaa

SEQ ID NO: 69 - DNA, 50 bp, synthetic construct
  source 1..50: mol_type = other DNA
aaagctcctggaactagtaaatgaattcagcaaagtttcagggtacaaaa

SEQ ID NO: 70 - DNA, 50 bp, synthetic construct
  source 1..50: mol_type = other DNA
ttaatgtacacaaatcagtagctctgctatacaccaacagtgacgaagct

SEQ ID NO: 71 - DNA, 50 bp, synthetic construct
  source 1..50: mol_type = other DNA
gagaatcaaatcaagaactcaaaccctttcataatagttgcaaaaataaa

SEQ ID NO: 72 - DNA, 50 bp, synthetic construct
  source 1..50: mol_type = other DNA
ataaaatacttaggaatatacctaaccaagaatgtgaaagacctctacaa

SEQ ID NO: 73 - DNA, 50 bp, synthetic construct
  source 1..50: mol_type = other DNA
gcaaaactacaaaatactcctgaaagaaactatagatgacacaaacaaat

SEQ ID NO: 74 - DNA, 50 bp, synthetic construct
  source 1..50: mol_type = other DNA
ggaaacacatcccatgcttataaatgggtagaatcaatattgtgaaaaat

SEQ ID NO: 75 - DNA, 50 bp, synthetic construct
  source 1..50: mol_type = other DNA
aaccatactgccaaaagcaatctagagattcaatgcaattcccataaaaa

SEQ ID NO: 76 - DNA, 11 bp, synthetic construct
  source 1..11: mol_type = other DNA
taccaccatta

SEQ ID NO: 77 - DNA, 50 bp, synthetic construct
  source 1..50: mol_type = other DNA
gagctgagtcaagttagacagctgagctgagtgaaatacagaggtagagg

SEQ ID NO: 78 - DNA, 50 bp, synthetic construct
  source 1..50: mol_type = other DNA
aagtagcagaaaggcacggggagctcgctggatccccaagtagcccattc

SEQ ID NO: 79 - DNA, 50 bp, synthetic construct
  source 1..50: mol_type = other DNA
ctgcctggcaccacaggcatccatcaggaggatggccagaggagcagggg

SEQ ID NO: 80 - DNA, 50 bp, synthetic construct
  source 1..50: mol_type = other DNA
gtaaaacttcacgggaaggtcttctctagctgaactttgtaacaatttga

SEQ ID NO: 81 - DNA, 30 bp, synthetic construct
  source 1..30: mol_type = other DNA
gcagaacgagaagcctcctagccagaattc

SEQ ID NO: 82 - DNA, 50 bp, synthetic construct
  source 1..50: mol_type = other DNA
gttatgattgaatgtatcctccaaatttgatgtgttggaaagttaatacc

SEQ ID NO: 83 - DNA, 50 bp, synthetic construct
  source 1..50: mol_type = other DNA
caatgtggcactattaaaaggtgaggactttaagaggtgatgggatcatg

SEQ ID NO: 84 - DNA, 50 bp, synthetic construct
  source 1..50: mol_type = other DNA
agtgctctgccttcagtaatgaatcaatccattaatggaacaacagatta

SEQ ID NO: 85 - DNA, 50 bp, synthetic construct
  source 1..50: mol_type = other DNA
aagggttaatggattaatggtggctatacaagaaaagagagacctgagct

SEQ ID NO: 86 - DNA, 50 bp, synthetic construct
  source 1..50: mol_type = other DNA
agcacaaccagtctccttgccatgtgatgccctgtggcctcaattcagga

SEQ ID NO: 87 - DNA, 50 bp, synthetic construct
  source 1..50: mol_type = other DNA
atcttcagagtccccaccggcgcaaaggctctcaccagatttggtccctc

SEQ ID NO: 88 - DNA, 50 bp, synthetic construct
  source 1..50: mol_type = other DNA
accctgagacatctcagcctccataactgtacaaaatgcttttcttttat

SEQ ID NO: 89 - DNA, 50 bp, synthetic construct
  source 1..50: mol_type = other DNA
ttataagttactcattctaggtattctataagcaacagaaaatggactaa

SEQ ID NO: 90 - skipped

SEQ ID NO: 91 - DNA, 50 bp, synthetic construct
  source 1..50: mol_type = other DNA
ggcacataggctgagctgaccaatcagagtggcttatctttctgactcaa

SEQ ID NO: 92 - DNA, 50 bp, synthetic construct
  source 1..50: mol_type = other DNA
gaattggccagaggtgggcaatttaccaaaactggggcaatcagagtcct

SEQ ID NO: 93 - DNA, 50 bp, synthetic construct
  source 1..50: mol_type = other DNA
ttatcttgtcttgatttgtgtgttggaagaaagagtgtttctctattcct

SEQ ID NO: 94 - DNA, 50 bp, synthetic construct
  source 1..50: mol_type = other DNA
gtgattacaatatgtaaggaacatacaaggctagatttcctagaagctga

SEQ ID NO: 95 - DNA, 50 bp, synthetic construct
  source 1..50: mol_type = other DNA
gctgggcacggtggctcatgcctgtaatcccagcactttgggagtctgag

SEQ ID NO: 96 - DNA, 50 bp, synthetic construct
  source 1..50: mol_type = other DNA
gcgggtggatcgcctgaggtcaggagttcaagaccagcctggccaacata

SEQ ID NO: 97 - DNA, 50 bp, synthetic construct
  source 1..50: mol_type = other DNA
gcaaaactccgtctctactaaaaatacaaaaaattagctggacgtggtgt

SEQ ID NO: 98 - DNA, 50 bp, synthetic construct
  source 1..50: mol_type = other DNA
tgggcgcctgtaatcccagctactagggaggctgaggcaggagaatctct

SEQ ID NO: 99 - DNA, 50 bp, synthetic construct
  source 1..50: mol_type = other DNA
taaacccaggaggcagaggttgcagtgagctgagattgtgccattgcatt

SEQ ID NO: 100 - DNA, 47 bp, synthetic construct
  source 1..47: mol_type = other DNA
ccagcctggacaacaagaacaaaactccatctcaaaaaaaaaaaaaa

SEQ ID NO: 101 - DNA, 50 bp, synthetic construct
  source 1..50: mol_type = other DNA
taaaaaagagggtggacaaagatttataaggtgacatttaaaaacagatg

SEQ ID NO: 102 - DNA, 50 bp, synthetic construct
  source 1..50: mol_type = other DNA
taattaatgatttcagacacatagatatcaacggtcaaaacgctaaatgg

SEQ ID NO: 103 - DNA, 50 bp, synthetic construct
  source 1..50: mol_type = other DNA
ttaaaagaagggttatttttatcatgaacactacattgcacagtgaagtt

SEQ ID NO: 104 - DNA, 35 bp, synthetic construct
  source 1..35: mol_type = other DNA
ataacagttataaaactttatgtattgactaacat

SEQ ID NO: 105 - DNA, 50 bp, synthetic construct
  source 1..50: mol_type = other DNA
tagtggacactggatgctccacttcgattcttcgggattcctttttgcca

SEQ ID NO: 106 - DNA, 50 bp, synthetic construct
  source 1..50: mol_type = other DNA
gttttgtaagcccattcccagcttttgtgtgctttgccagtaaggctttg

SEQ ID NO: 107 - DNA, 50 bp, synthetic construct
  source 1..50: mol_type = other DNA
cacctgagccctttggaggctggaccttgggcactgggtctgccttgtct

SEQ ID NO: 108 - DNA, 50 bp, synthetic construct
  source 1..50: mol_type = other DNA
acatgtaaagctgaaagtgcctggaagtttgatggccttccaatctctcc

SEQ ID NO: 109 - DNA, 50 bp, synthetic construct
  source 1..50: mol_type = other DNA
acacccagggcttctttgccccaggatgacatgctaggaggtataattta

SEQ ID NO: 110 - DNA, 50 bp, synthetic construct
  source 1..50: mol_type = other DNA
tgctctagagctcccatatcaggttttggaaattgcaagacttttttccc

SEQ ID NO: 111 - DNA, 50 bp, synthetic construct
  source 1..50: mol_type = other DNA
cttctctagctttccccactcccttactgttttctctcagaagcatatac

SEQ ID NO: 112 - DNA, 50 bp, synthetic construct
  source 1..50: mol_type = other DNA
ttaagaaatcactctcaatggaatctttgatttaagatgtgagtctgtga

SEQ ID NO: 113 - DNA, 14 bp, synthetic construct
  source 1..14: mol_type = other DNA
aacttaacctgaaa

SEQ ID NO: 114 - DNA, 50 bp, synthetic construct
  source 1..50: mol_type = other DNA
gatgatggatgtcttggcagatgcctatgtggatggccgacattgaagag

SEQ ID NO: 115 - DNA, 50 bp, synthetic construct
  source 1..50: mol_type = other DNA
cagacctgcttccttccttggcactaggtaaacaaccttaattaaagaag

SEQ ID NO: 116 - DNA, 50 bp, synthetic construct
  source 1..50: mol_type = other DNA
agaagaattgagccccaaattccacttctggtggaaaagggacttgaaat

SEQ ID NO: 117 - DNA, 30 bp, synthetic construct
  source 1..30: mol_type = other DNA
agatattaaattgatttgtagaaaaataaa

SEQ ID NO: 118 - DNA, 50 bp, synthetic construct
  source 1..50: mol_type = other DNA
gaactggggtatcaccaacagttgcatccaaatataagattttgtagcaa

SEQ ID NO: 119 - DNA, 25 bp, synthetic construct
  source 1..25: mol_type = other DNA
gacaatgaacagtcatgtaagtcag

SEQ ID NO: 120 - DNA, 50 bp, synthetic construct
  source 1..50: mol_type = other DNA
atttttaaattatcaatgtgttttcctcattcttttttgagacacatgac

SEQ ID NO: 121 - DNA, 50 bp, synthetic construct
  source 1..50: mol_type = other DNA
tttcacttagtcttccctaagtaattacttgcctgggttacaaaataaat

SEQ ID NO: 122 - DNA, 17 bp, synthetic construct
  source 1..17: mol_type = other DNA
gcaaaaagaactggaaa

SEQ ID NO: 123 - skipped

SEQ ID NO: 124 - DNA, 50 bp, synthetic construct; identical to SEQ ID NO: 120
  source 1..50: mol_type = other DNA

SEQ ID NO: 125 - DNA, 50 bp, synthetic construct; identical to SEQ ID NO: 121
  source 1..50: mol_type = other DNA

SEQ ID NO: 126 - DNA, 17 bp, synthetic construct
  source 1..17: mol_type = other DNA
gcaaaaagaactggaaa

SEQ ID NO: 127 - DNA, 50 bp, synthetic construct
  source 1..50: mol_type = other DNA
gtgagacagggatgggattggagtcaaagccatttgattatgagcttagc

SEQ ID NO: 128 - DNA, 50 bp, synthetic construct
  source 1..50: mol_type = other DNA
attacaacttaatagcagtatgatttgggcaagttatctaaactcattga

SEQ ID NO: 129 - DNA, 50 bp, synthetic construct
  source 1..50: mol_type = other DNA
acttcaatttctttatggaaagtgagattagtaattatgatattacaaga

SEQ ID NO: 130 - DNA, 50 bp, synthetic construct
  source 1..50: mol_type = other DNA
attagaaaaagttcatacagtgtgctcacaatgcctgcctgatttaaaaa

SEQ ID NO: 131 - DNA, 31 bp, synthetic construct
  source 1..31: mol_type = other DNA
aaatactcaacaagtcatagctatgattatt

SEQ ID NO: 132 - DNA, 50 bp, synthetic construct
  source 1..50: mol_type = other DNA
tgtcatagtctaaatgttgacatccccccaaaattcacgttgaaacctat

SEQ ID NO: 133 - DNA, 50 bp, synthetic construct
  source 1..50: mol_type = other DNA
tatctaatgtgatagtattatgaggtgcagccttttgggggagtgattaa

SEQ ID NO: 134 - DNA, 50 bp, synthetic construct
  source 1..50: mol_type = other DNA
atcacaatggctgtggcctcatgaatgggattagtgcccttacaaaagag

SEQ ID NO: 135 - DNA, 50 bp, synthetic construct
  source 1..50: mol_type = other DNA
atggaagtgcactgccttactttcttctatgtgaggacacagcaacaaga

SEQ ID NO: 136 - DNA, 50 bp, synthetic construct
  source 1..50: mol_type = other DNA
catcatctctagatcagagagtgaaccctttccagatactgagtctattg

SEQ ID NO: 137 - DNA, 50 bp, synthetic construct
  source 1..50: mol_type = other DNA
gcactttagtcttgcactcctcagcctccagaagtgtgagcaataaattt

SEQ ID NO: 138 - DNA, 50 bp, synthetic construct
  source 1..50: mol_type = other DNA
ctattgtttatccgttactcagtctatgatattttgtccagaagaactaa

SEQ ID NO: 139 - skipped

SEQ ID NO: 140 - DNA, 50 bp, synthetic construct
  source 1..50: mol_type = other DNA
aggtgctattaccacagaccctgcagacaacaaaaggtaataagggaata

SEQ ID NO: 141 - DNA, 50 bp, synthetic construct
  source 1..50: mol_type = other DNA
ctatcaacaactctacacacaaatttggcaacttagataaaatggatcaa

SEQ ID NO: 142 - DNA, 50 bp, synthetic construct
  source 1..50: mol_type = other DNA
tttcttaaaagtgcaaactaccacaactcactcagtatgaaactttgaat

SEQ ID NO: 143 - DNA, 50 bp, synthetic construct
  source 1..50: mol_type = other DNA
agccaaataactacttacaaaattaaattcataattttgagacttaaaaa

SEQ ID NO: 144 - DNA, 50 bp, synthetic construct
  source 1..50: mol_type = other DNA
aagaaaagaaagaaatctccaaccccagagagtttcactggagaatttga

SEQ ID NO: 145 - DNA, 50 bp, synthetic construct
  source 1..50: mol_type = other DNA
acaaagagcgaaagaattagccccaattttacacaatttctccaggaaat

SEQ ID NO: 146 - DNA, 50 bp, synthetic construct
  source 1..50: mol_type = other DNA
aaaagaagaatgaatgcttcttaattcattttgtgaaggtagtgttacac

SEQ ID NO: 147 - DNA, 50 bp, synthetic construct
  source 1..50: mol_type = other DNA
tgataccaaaaccaaagacagcacacacacacacacaacacacaatgaac

SEQ ID NO: 148 - DNA, 50 bp, synthetic construct
  source 1..50: mol_type = other DNA
tatagaccaatatctttcatgaatataaacatgaaatatttggaaaatag

SEQ ID NO: 149 - DNA, 50 bp, synthetic construct
  source 1..50: mol_type = other DNA
attcagtaatatctaaaaaaaattatatgctattacaaagtgtgatttat

SEQ ID NO: 150 - DNA, 50 bp, synthetic construct
  source 1..50: mol_type = other DNA
ccctgggatgctagactgctttaatatttaaaatcaatcaatgtaatatg

SEQ ID NO: 151 - DNA, 50 bp, synthetic construct
  source 1..50: mol_type = other DNA
tcatataaaaattacatgatcatatcaactgatgaaacaaaatcatttgg

SEQ ID NO: 152 - DNA, 50 bp, synthetic construct
  source 1..50: mol_type = other DNA
caaaattcaacacccattcatgattttaaaaaaacaacactcagaaaaat

SEQ ID NO: 153 - DNA, 50 bp, synthetic construct
  source 1..50: mol_type = other DNA
agaaatacagggaagttttctcaatttgacaaagagcatctgtaagaaaa

SEQ ID NO: 154 - DNA, 50 bp, synthetic construct
  source 1..50: mol_type = other DNA
cctacaatttccattatacttaatagtgaaaaactgaattctttccccct

SEQ ID NO: 155 - DNA, 50 bp, synthetic construct
  source 1..50: mol_type = other DNA
aagactgggagcaaggcaaagatcccactctctccactcttattcaacat

SEQ ID NO: 156 - DNA, 50 bp, synthetic construct
  source 1..50: mol_type = other DNA
agtgctacaagttctagccagcgcatcatggctagaaaatgaaataaaag

SEQ ID NO: 157 - DNA, 50 bp, synthetic construct
  source 1..50: mol_type = other DNA
gtatacagaccaaaaagaaagaaagaaaactgtttctatttgcagataac

SEQ ID NO: 158 - DNA, 50 bp, synthetic construct
  source 1..50: mol_type = other DNA
atgattgtttacatagaaaatcccaaggaatctgtaaaaagaactcctag

SEQ ID NO: 159 - DNA, 50 bp, synthetic construct
  source 1..50: mol_type = other DNA
aactaataaatgagttgagaaaagtcacagggtacaagatatacattcaa

SEQ ID NO: 160 - DNA, 12 bp, synthetic construct
  source 1..12: mol_type = other DNA
aaatcaactgtt

SEQ ID NO: 161 - DNA, 50 bp, synthetic construct
  source 1..50: mol_type = other DNA
aattttcccatctgtcatataaaaatgttggattatattatctctatgta

SEQ ID NO: 162 - DNA, 16 bp, synthetic construct
  source 1..16: mol_type = other DNA
ccttttctagctctaa

SEQ ID NO: 163 - DNA, 50 bp, synthetic construct
  source 1..50: mol_type = other DNA
acagccataaatgtctcggaaatcatagcagatgaacctggcagccagat

SEQ ID NO: 164 - DNA, 50 bp, synthetic construct
  source 1..50: mol_type = other DNA
aatcaggaatgaagtgccctttctaagagttcagtctaagaataagaatc

SEQ ID NO: 165 - skipped

SEQ ID NO: 166 - DNA, 50 bp, synthetic construct
  source 1..50: mol_type = other DNA
aaatggcatctggctagcaggtattgtttcagtaactctctgaattcctt

SEQ ID NO: 167 - DNA, 15 bp, synthetic construct
  source 1..15: mol_type = other DNA
gcaaaaatatttacg

SEQ ID NO: 168 - DNA, 50 bp, synthetic construct
  source 1..50: mol_type = other DNA
gaaattggtactgagaagtggagtgctgctttaacaaatacctaaaaatg

SEQ ID NO: 169 - DNA, 50 bp, synthetic construct
  source 1..50: mol_type = other DNA
tggaagtggctttggaactgggtaatgagcagagtctggaaggatttgga

SEQ ID NO: 170 - DNA, 50 bp, synthetic construct
  source 1..50: mol_type = other DNA
ggaagaggctgaaaaaaaaagcctgttttgctggaatggacagtaaagcg

SEQ ID NO: 171 - DNA, 50 bp, synthetic construct
  source 1..50: mol_type = other DNA
atattctgatattctggtgagggctcagaagaaaaggagagctgttaaga

SEQ ID NO: 172 - DNA, 50 bp, synthetic construct
  source 1..50: mol_type = other DNA
aacctcagtcttcttagactttatctaagtggttgtgaccagaatattga

SEQ ID NO: 173 - DNA, 50 bp, synthetic construct
  source 1..50: mol_type = other DNA
cagaaatatggatgttaaaggccattctgatgaggtctcagatggaagga

SEQ ID NO: 174 - DNA, 50 bp, synthetic construct
  source 1..50: mol_type = other DNA
acacattgttagaaactgaagaaaaaaccattcttgtataaagtggcaac

SEQ ID NO: 175 - DNA, 50 bp, synthetic construct
  source 1..50: mol_type = other DNA
aacttggctgaattgtgtttatctcctagtgctttgtggaaggtagaact

SEQ ID NO: 176 - DNA, 50 bp, synthetic construct
  source 1..50: mol_type = other DNA
tggaaacgatgaaatatttggaagaaatctctaagcgaagtgcgaagagt

SEQ ID NO: 177 - DNA, 50 bp, synthetic construct
  source 1..50: mol_type = other DNA
gcagcatggcttggcttctgttgactgcttatactaaaatatgagaagag

SEQ ID NO: 178 - DNA, 50 bp, synthetic construct
  source 1..50: mol_type = other DNA
aaaaactaaccaaagatggaatttataacaaacaaggaagtagaccttaa

SEQ ID NO: 179 - DNA, 50 bp, synthetic construct
  source 1..50: mol_type = other DNA
agatttgcaaaattctcagcctggccatgttgtaaagaatgaaaaattgt

SEQ ID NO: 180 - DNA, 50 bp, synthetic construct
  source 1..50: mol_type = other DNA
gttcaaggcgaacagcaagggtgtggccaagtcactatttgaaaaggata

SEQ ID NO: 181 - DNA, 50 bp, synthetic construct
  source 1..50: mol_type = other DNA
tttagtatggatgggcagaagcttgcttgcttctattcatcaaggcaatg

SEQ ID NO: 182 - DNA, 50 bp, synthetic construct
  source 1..50: mol_type = other DNA
ggagaatgggcctgaaaacatttccgagatcttcagcagctgccctgtcc

SEQ ID NO: 183 - DNA, 50 bp, synthetic construct
  source 1..50: mol_type = other DNA
attacaggcccagaataccagggccttgagaacagaaatatttcaaactt

SEQ ID NO: 184 - DNA, 50 bp, synthetic construct
  source 1..50: mol_type = other DNA
ctgcccctctcattctggtgcagcactccttcaacccctcagctgtggct

SEQ ID NO: 185 - DNA, 50 bp, synthetic construct
  source 1..50: mol_type = other DNA
caaatgggcccaagagcagctcaggtttctcctctgtgcagatgcacagg

SEQ ID NO: 186 - DNA, 50 bp, synthetic construct
  source 1..50: mol_type = other DNA
cagtaaaccttggtggcatctgcacagtgccacctcaccagagtgcttga

SEQ ID NO: 187 - DNA, 50 bp, synthetic construct
  source 1..50: mol_type = other DNA
gctgtgaggacatggctacctccacctagatttcaaaggattacccagag

SEQ ID NO: 188 - DNA, 50 bp, synthetic construct
  source 1..50: mol_type = other DNA
agcctcagagccactgcagagagtcctcactagagcaatgtctagaggag

SEQ ID NO: 189 - DNA, 50 bp, synthetic construct
  source 1..50: mol_type = other DNA
ccatagaggcagagtctcttctgagaccccccaaaaatagagccaccagc

SEQ ID NO: 190 - DNA, 50 bp, synthetic construct
  source 1..50: mol_type = other DNA
aagcaactccaaacaatgacaactacagcatgggctgcacccggcaaagc

SEQ ID NO: 191 - DNA, 50 bp, synthetic construct
  source 1..50: mol_type = other DNA
catgagggcagggctgttcagacctgtgaggcccagcctctacccctgtg

SEQ ID NO: 192 - DNA, 50 bp, synthetic construct
  source 1..50: mol_type = other DNA
tgtctggaagatgagatatcaagtcaaagaagattattctggagtcttaa

SEQ ID NO: 193 - DNA, 50 bp, synthetic construct
  source 1..50: mol_type = other DNA
ggtttaacgtttgccctattgggttttggatttggttggaacctgctatc

SEQ ID NO: 194 - DNA, 50 bp, synthetic construct
  source 1..50: mol_type = other DNA
ccctttttaaaaaaaatccttccttttgaaatggaaatgtctatcctatg

SEQ ID NO: 195 - DNA, 50 bp, synthetic construct
  source 1..50: mol_type = other DNA
cctgtcccatcattgtattttggaagtatataacatgtttgatttcacag

SEQ ID NO: 196 - DNA, 50 bp, synthetic construct
  source 1..50: mol_type = other DNA
ctggagagtaacttgcctcaggataaatcataccttgagtctcagccatc

SEQ ID NO: 197 - DNA, 50 bp, synthetic construct
  source 1..50: mol_type = other DNA
tccgatttagttgatattaagatgagaccgagttttagacttttgagttg

SEQ ID NO: 198 - DNA, 50 bp, synthetic construct
  source 1..50: mol_type = other DNA
gtactggaacaagttaaaattctgggggctattgggatggaacaaatata

SEQ ID NO: 199 - DNA, 46 bp, synthetic construct
  source 1..46: mol_type = other DNA
tgctccatgtgagggggccatgaattatagggggccaggaacagaa

SEQ ID NO: 200 - DNA, 50 bp, synthetic construct
  source 1..50: mol_type = other DNA
gccgggtgcggtggctcacacctgtaatcccagcactttgggaggccaag

SEQ ID NO: 201 - DNA, 50 bp, synthetic construct
  source 1..50: mol_type = other DNA
gcgggtggatcccctgaggtcaggagtttgagaccagcctgaccaatatg

SEQ ID NO: 202 - DNA, 50 bp, synthetic construct
  source 1..50: mol_type = other DNA
gtgaaaccccatctctactaacaatacaaaaaaattagccgggcgtggtg

SEQ ID NO: 203 - DNA, 50 bp, synthetic construct
  source 1..50: mol_type = other DNA
gcgggcgcctgtaatcccagctactccagaggctgaggcaggagaatcgc

SEQ ID NO: 204 - DNA, 50 bp, synthetic construct
  source 1..50: mol_type = other DNA
ttgaaccctggaggcagaggttgcagtgagccaagattgcgccactgcac

SEQ ID NO: 205 - DNA, 31 bp, synthetic construct
  source 1..31: mol_type = other DNA
tccagcctgggcgagacagagcgatactctg

SEQ ID NO: 206 - DNA, 50 bp, synthetic construct
  source 1..50: mol_type = other DNA
gaattacatccccccaaaacatatgttcaagtcctaaccacaggtacctg

SEQ ID NO: 207 - DNA, 50 bp, synthetic construct
  source 1..50: mol_type = other DNA
tgaacatgagtttatttggaactaggatctttgcaaatgttatcaagtta

SEQ ID NO: 208 - DNA, 50 bp, synthetic construct
  source 1..50: mol_type = other DNA
agatgaggtaatactggattggggtgggctctaaatccaatgactggtgt

SEQ ID NO: 209 - DNA, 50 bp, synthetic construct
  source 1..50: mol_type = other DNA
cttcataaaagaaaggtgagggagagttgaatatagcgacacaaaggaaa

SEQ ID NO: 210 - DNA, 50 bp, synthetic construct
  source 1..50: mol_type = other DNA
cacggggaaggagaccatgtgacaatgtaggcacagaatggagtgttgca

SEQ ID NO: 211 - DNA, 50 bp, synthetic construct
  source 1..50: mol_type = other DNA
gccaagccaagaatggcaaggattgctggagctaccagaagctaggagga

SEQ ID NO: 212 - DNA, 50 bp, synthetic construct
  source 1..50: mol_type = other DNA
ggcaaaggattcttccctagagccttcagagggatcatggccttaatggc

SEQ ID NO: 213 - DNA, 50 bp, synthetic construct
  source 1..50: mol_type = other DNA
accttgagttcagaattttaggctccaggactgtgacagaataaattccc

SEQ ID NO: 214 - DNA, 50 bp, synthetic construct
  source 1..50: mol_type = other DNA
gttgtaagctgttcagtcggtggtaaatttttacagcagccccaggaaaa

SEQ ID NO: 215 - skipped

SEQ ID NO: 216 - DNA, 50 bp, synthetic construct
  source 1..50: mol_type = other DNA
tgctatggtttgggtatttgtctcctctaaacctcatgttgaaatgtgac

SEQ ID NO: 217 - DNA, 50 bp, synthetic construct
  source 1..50: mol_type = other DNA
cccaattttggaggtggggcctaatgggagatgtttcggtcatggaggtg

SEQ ID NO: 218 - DNA, 50 bp, synthetic construct
  source 1..50: mol_type = other DNA
gatccctcacaaatagattgatgctattccctgcaaggaggagaggatga

SEQ ID NO: 219 - DNA, 50 bp, synthetic construct
  source 1..50: mol_type = other DNA
gtgagttctcactgcattagttcctatgagagctggttgctaaaaagttt

SEQ ID NO: 220 - DNA, 50 bp, synthetic construct
  source 1..50: mol_type = other DNA
ggcatctctcccctctctctcgccatacgatctctctgcacacaccaccc

SEQ ID NO: 221 - DNA, 50 bp, synthetic construct
  source 1..50: mol_type = other DNA
gcctttgccttccattgagtggaagcagcctgaggccctcaccagacgca

SEQ ID NO: 222 - DNA, 50 bp, synthetic construct
  source 1..50: mol_type = other DNA
tatgctggtgccatgcttcttgtacagtctgaagactgtgagcctaataa

SEQ ID NO: 223 - DNA, 50 bp, synthetic construct
  source 1..50: mol_type = other DNA
acctcttttcattataagctacctagtcttgtgtattctgccatagcaac

SEQ ID NO: 224 - DNA, 17 bp, synthetic construct
  source 1..17: mol_type = other DNA
acaaatgaactaagaca

SEQ ID NO: 225 - DNA, 50 bp, synthetic construct
  source 1..50: mol_type = other DNA
atagtttagtgtggtggttaatatcatgcacactggagccaaatctgtta

SEQ ID NO: 226 - DNA, 50 bp, synthetic construct
  source 1..50: mol_type = other DNA
ggttcaaatcctgactctccttctatttactaattatgaaaccttaggaa

SEQ ID NO: 227 - DNA, 50 bp, synthetic construct
  source 1..50: mol_type = other DNA
aattattcaacttttcatctgtaaatatggggattataatggtgatccac

SEQ ID NO: 228 - DNA, 41 bp, synthetic construct
  source 1..41: mol_type = other DNA
tttatatgactgacaaccaaataagtgaatacgtgtatagc

SEQ ID NO: 229 - DNA, 50 bp, synthetic construct
  source 1..50: mol_type = other DNA
aaagtcaactgtctcttcccctctccatcctttaggaactgtctgcagta

SEQ ID NO: 230 - DNA, 50 bp, synthetic construct
  source 1..50: mol_type = other DNA
tctgacactgttgagagctctcataccctttaaactctctcttctctggc

SEQ ID NO: 231 - DNA, 50 bp, synthetic construct
  source 1..50: mol_type = other DNA
tttctgagctttcctcccacttttgatggcactgcaggagtttttaagca

SEQ ID NO: 232 - DNA, 50 bp, synthetic construct
  source 1..50: mol_type = other DNA
tctctctctcataccaaccccagaaataaagtcattcctcgaattcctgt

SEQ ID NO: 233 - DNA, 50 bp, synthetic construct
  source 1..50: mol_type = other DNA
acttagccccttgtctcctaactctttgaccactaatgttttagaaacac

SEQ ID NO: 234 - DNA, 50 bp, synthetic construct
  source 1..50: mol_type = other DNA
tctcctgacaactatcgcatctttgcagttgtttccatttccaacgccat

SEQ ID NO: 235 - DNA, 50 bp, synthetic construct
  source 1..50: mol_type = other DNA
gtctctctgagcagcagccttgagttttcaattgcatatttattagtcat

SEQ ID NO: 236 - DNA, 50 bp, synthetic construct
  source 1..50: mol_type = other DNA
ttccatatggacatctcactaaatctgtcatactaaacatgtctaaaata

SEQ ID NO: 237 - DNA, 50 bp, synthetic construct
  source 1..50: mol_type = other DNA
tgtatgtttacatgttacatgtatgtttggtatgtgggaatgcattacat

SEQ ID NO: 238 - DNA, 50 bp, synthetic construct
  source 1..50: mol_type = other DNA
tcccacagattttttcccagttacagtgttactattctaatcactcagac

SEQ ID NO: 239 - DNA, 50 bp, synthetic construct
  source 1..50: mol_type = other DNA
tgttatgggctgaataatgtcacccaccctgaaattcctatgttgaagtc

SEQ ID NO: 240 - DNA, 50 bp, synthetic construct
  source 1..50: mol_type = other DNA
ctaacccccagtacctcagaatgtaactggattttgagatagggttttta

SEQ ID NO: 241 - DNA, 50 bp, synthetic construct
  source 1..50: mol_type = other DNA
aagaggtatataagttaaaatgaggacagtgggatgggccctaatctaat

SEQ ID NO: 242 - DNA, 50 bp, synthetic construct
  source 1..50: mol_type = other DNA
atgactgatgtccttataagacgaaatgatttggacgtggacacagaggg

SEQ ID NO: 243 - DNA, 50 bp, synthetic construct
  source 1..50: mol_type = other DNA
acaaccacatgaggacagggagaagatggccatctgcaagccaaggagag

SEQ ID NO: 244 - DNA, 50 bp, synthetic construct
  source 1..50: mol_type = other DNA
aagccctcaagtaaaccaatgctgccaacacattgctgttgaacttccag

SEQ ID NO: 245 - DNA, 50 bp, synthetic construct
  source 1..50: mol_type = other DNA
tctctagaacgataaaaaatatttctgttgtttaagccacccagtctgag

SEQ ID NO: 246 - DNA, 28 bp, synthetic construct
  source 1..28: mol_type = other DNA
atattttgttttggcagccctaacaaac

SEQ ID NO: 247 - DNA, 50 bp, synthetic construct
  source 1..50: mol_type = other DNA
aactcatcccggttgatccaggactatcttgcttttagcacagagagtcc

SEQ ID NO: 248 - DNA, 50 bp, synthetic construct
  source 1..50: mol_type = other DNA
cttgcgcaggaaaccctcaggctctagtaaaccagggtgattggtcatgc

SEQ ID NO: 249 - skipped

SEQ ID NO: 250 - DNA, 50 bp, synthetic construct
  source 1..50: mol_type = other DNA
ggagctctgggagaagaaagactttttttaaagcttcagctgggtgtgga

SEQ ID NO: 251 - DNA, 50 bp, synthetic construct
  source 1..50: mol_type = other DNA
cagattgccagttggtttactgccagcccacaaaagcagaaacctttccc

SEQ ID NO: 252 - DNA, 50 bp, synthetic construct
  source 1..50: mol_type = other DNA
ctggcaggtttgccactgcataaaagaccctaactacttgtcctgtaatt

SEQ ID NO: 253 - DNA, 50 bp, synthetic construct
  source 1..50: mol_type = other DNA
ataggtcagtgtatacagagcctgaggtctgaacaggaaatggaaaataa

SEQ ID NO: 254 - DNA, 50 bp, synthetic construct
  source 1..50: mol_type = other DNA
taacttgccctagtagtactagcaagccagagaggaaaactaagataaac

SEQ ID NO: 255 - DNA, 50 bp, synthetic construct
  source 1..50: mol_type = other DNA
acttcaaacaggtgttttgttgaaatagaactgttagaagagccaggtga

SEQ ID NO: 256 - DNA, 48 bp, synthetic construct
  source 1..48: mol_type = other DNA
aaacttttctaaaaagtaataaattcactcaagaagatataattaaag

SEQ ID NO: 257 - DNA, 50 bp, synthetic construct
  source 1..50: mol_type = other DNA
aagagggacattatataatgataaaagaactagtccaaagggaaaatatc

SEQ ID NO: 258 - DNA, 50 bp, synthetic construct
  source 1..50: mol_type = other DNA
acaatcctaaatatatatgcacctaacactgaagctccaaatttaataaa

SEQ ID NO: 259 - DNA, 50 bp, synthetic construct
  source 1..50: mol_type = other DNA
acaattactactagacctgagaaatgagatagacagcaacacaataatag

SEQ ID NO: 260 - DNA, 50 bp, synthetic construct
  source 1..50: mol_type = other DNA
tggggactttaatactccactgacaccactggataggtgatcacgacaaa

SEQ ID NO: 261 - DNA, 50 bp, synthetic construct
  source 1..50: mol_type = other DNA
agtcaacaaagaaacaagacttaaagtataacccagaacaaatggactta

SEQ ID NO: 262 - DNA, 50 bp, synthetic construct
  source 1..50: mol_type = other DNA
gcagatatttacagaacattctacccagcaactgcagaatatatattcca

SEQ ID NO: 263 - DNA, 50 bp, synthetic construct
  source 1..50: mol_type = other DNA
ttcatccacacatggaacattctccacgacagatgatatgataggtcaca

SEQ ID NO: 264 - DNA, 50 bp, synthetic construct
  source 1..50: mol_type = other DNA
aaacaagtctcaataaagttaagaaaatcaaaattatatcaagtactccc

SEQ ID NO: 265 - DNA, 50 bp, synthetic construct
  source 1..50: mol_type = other DNA
tcataccacagcaaaataaaattggaaattaactccaaaaagaacctcaa

SEQ ID NO: 266 - DNA, 50 bp, synthetic construct
  source 1..50: mol_type = other DNA
aactaaacaaatacatagaaattaaataatctgctcctgaaggttctttg

SEQ ID NO: 267 - DNA, 50 bp, synthetic construct
  source 1..50: mol_type = other DNA
ggtaagcaatgaaatcaagatggaaaataaaaaattatttgaacaataat

SEQ ID NO: 268 - DNA, 50 bp, synthetic construct
  source 1..50: mol_type = other DNA
agtgacacaacccgttaaaacctctgggatacagcaaaagcagtgctaag

SEQ ID NO: 269 - DNA, 50 bp, synthetic construct
  source 1..50: mol_type = other DNA
aggaaagttcatagcattaaatgcctacatcaaaaattctgatgtaggca

SEQ ID NO: 270 - DNA, 50 bp, synthetic construct
  source 1..50: mol_type = other DNA
tcagacaatctaagctcacacctcaaagaacaatagaaacaagaagaaac

SEQ ID NO: 271 - DNA, 50 bp, synthetic construct
  source 1..50: mol_type = other DNA
caaacaaaccaaacccaaacccagcagaagaaaaaaaaaaataactaaga

SEQ ID NO: 272 - DNA, 50 bp, synthetic construct
  source 1..50: mol_type = other DNA
tccaagcagatctaaatgaaattgaaacaaaaatgcaaaacataagtgaa

SEQ ID NO: 273 - DNA, 50 bp, synthetic construct
  source 1..50: mol_type = other DNA
acaaaaagctgtttacttgaatagataaacaaaattcgtacaccattagt

SEQ ID NO: 274 - DNA, 50 bp, synthetic construct
  source 1..50: mol_type = other DNA
gagattaaccaataaaagaagatccaaataagctcaattagaaatgaaat

SEQ ID NO: 275 - DNA, 50 bp, synthetic construct
  source 1..50: mol_type = other DNA
gggagatattacaacagataccacagaaatacaaaaggtaattcagggtt

SEQ ID NO: 276 - DNA, 50 bp, synthetic construct
  source 1..50: mol_type = other DNA
actatgaacacttttatgtgcacaaactagaacacccagaagagatggat

SEQ ID NO: 277 - DNA, 50 bp, synthetic construct
  source 1..50: mol_type = other DNA
aaattcctggaaatacatgctcctagattgagccaggaagatatataaac

SEQ ID NO: 278 - DNA, 50 bp, synthetic construct
  source 1..50: mol_type = other DNA
tctgaacagatcaataacaagcagcgagattgaaatggaaacaaaaaaaa

SEQ ID NO: 279 - DNA, 50 bp, synthetic construct
  source 1..50: mol_type = other DNA
attgccaacaaaaaacagtccaggaccagacagattcgcaactgaattct

SEQ ID NO: 280 - DNA, 50 bp, synthetic construct
  source 1..50: mol_type = other DNA
atcggaaagtcaaataagaattggtaccaattttaatgaaactattccaa

SEQ ID NO: 281 - DNA, 50 bp, synthetic construct
  source 1..50: mol_type = other DNA
aagatagaaaaagagggaatctttcataaatcattctatgaagccagtat

SEQ ID NO: 282 - DNA, 50 bp, synthetic construct
  source 1..50: mol_type = other DNA
tatcctaacaccaaaaccagtaaaggacataacaaaaaaaaggaaagcta

SEQ ID NO: 283 - DNA, 50 bp, synthetic construct
  source 1..50: mol_type = other DNA
cagaccaacatccctgatgaacatagatgcaaaaatcctcaacaaaatac

SEQ ID NO: 284 - DNA, 50 bp, synthetic construct
  source 1..50: mol_type = other DNA
tagtgaaccgaatccaacagcatatcaaaaagacaattcgccataatcaa

SEQ ID NO: 285 - DNA, 50 bp, synthetic construct
  source 1..50: mol_type = other DNA
gtgggtttcataaaagggattcagggatggtttaacatacacaagtcaaa

SEQ ID NO: 286 - DNA, 50 bp, synthetic construct
  source 1..50: mol_type = other DNA
aaatgtgatacaccacatgaacagaattaaaaacaaaaattgcatgacca

SEQ ID NO: 287 - DNA, 50 bp, synthetic construct
  source 1..50: mol_type = other DNA
tctcaatagatgcagaaaaaaaaactgacaaaagccagcatccctttatg

SEQ ID NO: 288 - DNA, 50 bp, synthetic construct
  source 1..50: mol_type = other DNA
attaaaaccctcagcaaaatcggcatagaagggatataccttaaggtgat

SEQ ID NO: 289 - DNA, 50 bp, synthetic construct
  source 1..50: mol_type = other DNA
aaaagtccccgcagccaacattatactgaatggggaaaagtttaaagcat

SEQ ID NO: 290 - DNA, 50 bp, synthetic construct
  source 1..50: mol_type = other DNA
tccccctgagaactggaacaagacaaggatgcctgctttcaccatttgta

SEQ ID NO: 291 - DNA, 50 bp, synthetic construct
  source 1..50: mol_type = other DNA
ttcaacatagaagtggaagtcctagccagagcagtcagacaagagaaaga

SEQ ID NO: 292 - DNA, 50 bp, synthetic construct
  source 1..50: mol_type = other DNA
aagaatgggcatccaaatcagtaaagaggaagtcaaactgttgctgttca

SEQ ID NO: 293 - DNA, 50 bp, synthetic construct
  source 1..50: mol_type = other DNA
ccaatgatataatcacatacctagaaaaccctaaaaatgcatccaaaaag

SEQ ID NO: 294 - DNA, 50 bp, synthetic construct
  source 1..50: mol_type = other DNA
ctcctagatctgataaataaattcagtaaagtttcaggatacaaaatcaa

SEQ ID NO: 295 - DNA, 50 bp, synthetic construct
  source 1..50: mol_type = other DNA
tgcatacaaatcagtagcactgctatacaccaacagcaaccaagctgaga

SEQ ID NO: 296 - DNA, 50 bp, synthetic construct
  source 1..50: mol_type = other DNA
atcacatcaagaactcaatcccttttacaatacctgtaaaaataaaataa

SEQ ID NO: 297 - DNA, 50 bp, synthetic construct
  source 1..50: mol_type = other DNA
aatacttaggaatatacctaaccaaggatgtgaaagacctctacaaggaa

SEQ ID NO: 298 - DNA, 50 bp, synthetic construct
  source 1..50: mol_type = other DNA
aactacaaaacactgcagaaagaaatcatagatggcacaaacaaatggaa

SEQ ID NO: 299 - DNA, 50 bp, synthetic construct
  source 1..50: mol_type = other DNA
aacacatcccatgctcataattgggtagaaccaatattgtgagaaataac

SEQ ID NO: 300 - DNA, 50 bp, synthetic construct
  source 1..50: mol_type = other DNA
catactgccaaaagcaatctacagattcaatgcaattcccataaaaataa

SEQ ID NO: 301 - DNA, 50 bp, synthetic construct
  source 1..50: mol_type = other DNA
caccatcattcttcacagaattagaaaaaaaaatcctaaaattcatatgg

SEQ ID NO: 302 - DNA, 50 bp, synthetic construct
  source 1..50: mol_type = other DNA
aacccaaaaaagagcctgcatagccaaagcaagactaagaaaaaagaaca

SEQ ID NO: 303 - DNA, 50 bp, synthetic construct
  source 1..50: mol_type = other DNA
aatctggagggatcacattacctgacttcaaactatactctatggccata

SEQ ID NO: 304 - DNA, 50 bp, synthetic construct
  source 1..50: mol_type = other DNA
gtcaccaaaacagcatggcactgaaaaataggcacatagaccaatggaac

SEQ ID NO: 305 - DNA, 50 bp, synthetic construct
  source 1..50: mol_type = other DNA
agaatacaaaacccagaaataaagccaaatacttacagtcaactgatttt

SEQ ID NO: 306 - DNA, 50 bp, synthetic construct
  source 1..50: mol_type = other DNA
cagcaaaggaaacaaaaacataaaatggggaaaggacacccttttcaaca

SEQ ID NO: 307 - DNA, 50 bp, synthetic construct
  source 1..50: mol_type = other DNA
gatggtcctgggataactggcaaaccgcatgtagaagaatgaatccagat

SEQ ID NO: 308 - DNA, 50 bp, synthetic construct
  source 1..50: mol_type = other DNA
cctcatctgtcaccctatataaaaatcaactcaagatggatcaaagaatt

SEQ ID NO: 309 - DNA, 50 bp, synthetic construct
  source 1..50: mol_type = other DNA
aaatctaagacatgaaaccataagatgctagaaattaacatcagaacaac

SEQ ID NO: 310 - DNA, 50 bp, synthetic construct
  source 1..50: mol_type = other DNA
ttttctagacattagcttaggcaaagacttcatgaccaagaacccaaaag

SEQ ID NO: 311 - DNA, 50 bp, synthetic construct
  source 1..50: mol_type = other DNA
gaaatgcaacaaaaacaaagataaatagatgggaataaactaaaaatctt

SEQ ID NO: 312 - DNA, 50 bp, synthetic construct
  source 1..50: mol_type = other DNA
ctgcacagaaaaaggaataattagcagagtaaacagacaatccacaggtg

SEQ ID NO: 313 - DNA, 22 bp, synthetic construct
  source 1..22: mol_type = other DNA
gtagaaaatatttgcaaactat

SEQ ID NO: 314 - DNA, 50 bp, synthetic construct
  source 1..50: mol_type = other DNA
ataccattcaggacataggcatgggcaaggacttcatgactaaaacacca

SEQ ID NO: 315 - DNA, 50 bp, synthetic construct
  source 1..50: mol_type = other DNA
aaggcaatggcaacaaaagccaaaattgacaaatgggatctaattaaact

SEQ ID NO: 316 - DNA, 50 bp, synthetic construct
  source 1..50: mol_type = other DNA
aaagagtttctgcacagcaaaagaaactaccatcagagtgaacaggcaac

SEQ ID NO: 317 - DNA, 50 bp, synthetic construct
  source 1..50: mol_type = other DNA
ctacagaatgggagaaaatttttgcaatctacccatctgacaaagggcta

SEQ ID NO: 318 - DNA, 50 bp, synthetic construct
  source 1..50: mol_type = other DNA
atatccagaatctacaaagaactcaaacaaatttacaacaaaaaaaacaa

SEQ ID NO: 319 - DNA, 50 bp, synthetic construct
  source 1..50: mol_type = other DNA
ccacatcaaaaagtgggcaaaggatacgaacagacacttctcaaaagaag

SEQ ID NO: 320 - DNA, 50 bp, synthetic construct
  source 1..50: mol_type = other DNA
acatctatgcagtcaacagacacatgaaaaaatgctcatcatcactggcc

SEQ ID NO: 321 - DNA, 50 bp, synthetic construct
  source 1..50: mol_type = other DNA
atcagagaaatgcaaatcaaaaccacaatgagataccatctcacaccagt

SEQ ID NO: 322 - DNA, 50 bp, synthetic construct
  source 1..50: mol_type = other DNA
tagaatggcaatcattaaaaagtcaggaaacaacagatgctggagaggat

SEQ ID NO: 323 - DNA, 50 bp, synthetic construct
  source 1..50: mol_type = other DNA
gtggagaaataggagcgcttttacactgttggtgggagtataaattagtt

SEQ ID NO: 324 - DNA, 50 bp, synthetic construct
  source 1..50: mol_type = other DNA
caaccattgtggaagacagtgtggcgatccctcaaggatctagaaccgga

SEQ ID NO: 325 - DNA, 50 bp, synthetic construct
  source 1..50: mol_type = other DNA
aataccatttgacccagcaatctcattactgggtatatacccaaaggatt

SEQ ID NO: 326 - DNA, 50 bp, synthetic construct
  source 1..50: mol_type = other DNA
ataaatcatgctactataaagacacatgcatagacatgtttattgtggca

SEQ ID NO: 327 - DNA, 50 bp, synthetic construct
  source 1..50: mol_type = other DNA
ctattcacaatagcaaagacttagaaccaacccaaatatccatcaatgat

SEQ ID NO: 328 - DNA, 50 bp, synthetic construct
  source 1..50: mol_type = other DNA
agactggattaagaaaatgtggcacatatacaccatggaatactatgcag

SEQ ID NO: 329 - DNA, 50 bp, synthetic construct
  source 1..50: mol_type = other DNA
ccataaataaggatatttattataaaataaaagttcatgtcttttgcagg

SEQ ID NO: 330 - DNA, 50 bp, synthetic construct
  source 1..50: mol_type = other DNA
gacatgaatgaagctggaaaccaacattctcagcaaactaccacaaggac

SEQ ID NO: 331 - DNA, 50 bp, synthetic construct
  source 1..50: mol_type = other DNA
agaaaaccaaacaccacaggttctcactcatcggtgggaattgaacaatg

SEQ ID NO: 332 - DNA, 50 bp, synthetic construct
  source 1..50: mol_type = other DNA
agatcacttggacacagggcaggggatattacacactggggcctgtcggg

SEQ ID NO: 333 - DNA, 50 bp, synthetic construct
  source 1..50: mol_type = other DNA
ggatgggggttaggggagggatagcattaggagaaataattaatgtaaat

SEQ ID NO: 334 - DNA, 50 bp, synthetic construct
  source 1..50: mol_type = other DNA
gacgagttgatgggtgcatcaaaccaacatggcacatgtatacctatgta

SEQ ID NO: 335 - DNA, 50 bp, synthetic construct
  source 1..50: mol_type = other DNA
tcaaacctgcatgttgtgcacatgtaccctagaacttaaagtataataat

SEQ ID NO: 336 - DNA, 12 bp, synthetic construct
  source 1..12: mol_type = other DNA
taaaaaaaaaaa

SEQ ID NO: 337 - DNA, 50 bp, synthetic construct
  source 1..50: mol_type = other DNA
gagaggtgacagcgtgctggcagtcttcacagctctcgctcgctctcggc

SEQ ID NO: 338 - DNA, 50 bp, synthetic construct
  source 1..50: mol_type = other DNA
acctcctctgcctgggctcctactttggcggcacttgaggagcctttcag

SEQ ID NO: 339 - DNA, 50 bp, synthetic construct
  source 1..50: mol_type = other DNA
cctactgctgcactatgggagacttcttctgggctggccaaggccagagc

SEQ ID NO: 340 - DNA, 50 bp, synthetic construct
  source 1..50: mol_type = other DNA
cggctttttcagcttgcagggaggtgtggagggagaggcacgagcaggaa

SEQ ID NO: 341 - DNA, 50 bp, synthetic construct
  source 1..50: mol_type = other DNA
ccagggcacttgcgggccagctggagttccaggtgagcatgggcttggca

SEQ ID NO: 342 - DNA, 50 bp, synthetic construct
  source 1..50: mol_type = other DNA
ggccccgcactcagaacagccggccggccctgccggccctaggcaatgaa

SEQ ID NO: 343 - DNA, 50 bp, synthetic construct
  source 1..50: mol_type = other DNA
ggacttagcacccgggccagcgcctgcggagggtgtactaggtcccccag

SEQ ID NO: 344 - DNA, 50 bp, synthetic construct
  source 1..50: mol_type = other DNA
cagtgccagcctaccggtgctgcactcgatttctcgccaggccttagctg

SEQ ID NO: 345 - DNA, 50 bp, synthetic construct
  source 1..50: mol_type = other DNA
ccttcccacaggacaggcctaaggactgcagtcccccatgcctgagcctt

SEQ ID NO: 346 - DNA, 50 bp, synthetic construct
  source 1..50: mol_type = other DNA
cccccgcctccgtaggttcctgtgcagcccgagcctccccgaggaggagc

SEQ ID NO: 347 - DNA, 50 bp, synthetic construct
  source 1..50: mol_type = other DNA
accgccccctgctccatggcacccagtcccatcaaccacccaagggctga

SEQ ID NO: 348 - DNA, 50 bp, synthetic construct
  source 1..50: mol_type = other DNA
ggagtgcaagtgcatggcgcaggactggcaggcagctccacctgcagccc

SEQ ID NO: 349 - DNA, 50 bp, synthetic construct
  source 1..50: mol_type = other DNA
cagtgcaggatgcactaggtgaagccagctaggctcctgagtctggtgag

SEQ ID NO: 350 - DNA, 50 bp, synthetic construct
  source 1..50: mol_type = other DNA
gacatggagagtctttatgtctagctcaaggattgtaaacacaccaatca

SEQ ID NO: 351 - DNA, 50 bp, synthetic construct
  source 1..50: mol_type = other DNA
gcaccctgtgtctagctcaaagtttgtgagtgcaccaatcaacactctgt

SEQ ID NO: 352 - DNA, 50 bp, synthetic construct
  source 1..50: mol_type = other DNA
atctagctactctggtggagccttagagaatctttatgtctagctcaagg

SEQ ID NO: 353 - DNA, 50 bp, synthetic construct
  source 1..50: mol_type = other DNA
attgtaaatacaccaatcggcactctgtatctagctcaaggtttgtaaac

SEQ ID NO: 354 - DNA, 50 bp, synthetic construct
  source 1..50: mol_type = other DNA
acaccaatcagcaccctgtgtctagctcaaggtttgtgagtgcaccaatt

SEQ ID NO: 355 - DNA, 50 bp, synthetic construct
  source 1..50: mol_type = other DNA
gacactctgtatctagctgctctggtagggccttagagaacctttacgtc

SEQ ID NO: 356 - DNA, 50 bp, synthetic construct
  source 1..50: mol_type = other DNA
tagctcaaagattgtaaatacaccaatcggcactctgtatctagctcaag

SEQ ID NO: 357 - DNA, 50 bp, synthetic construct
  source 1..50: mol_type = other DNA
gtttgtaaacacaccaatcagcatcctgtgtctagcttaaagtttgtgaa

SEQ ID NO: 358 - DNA, 50 bp, synthetic construct
  source 1..50: mol_type = other DNA
tgcaccaatcgacactctgtatctagctgctctagtgaggccttggagaa

SEQ ID NO: 359 - DNA, 50 bp, synthetic construct
  source 1..50: mol_type = other DNA
cctttgcgtggatactgtgtatctaactaatctaataaggacgtggagag

SEQ ID NO: 360 - DNA, 50 bp, synthetic construct
  source 1..50: mol_type = other DNA
cctttgtatctagctcaaggattgtaaacgcaccaatcagcgccctgtca

SEQ ID NO: 361 - DNA, 50 bp, synthetic construct
  source 1..50: mol_type = other DNA
aaacagaccactcggctccaccaatcagcaggatgtgggtagggccagat

SEQ ID NO: 362 - DNA, 50 bp, synthetic construct
  source 1..50: mol_type = other DNA
aagagaaaaaaagcaggctgcccgagcctagcagcagcaaccggctcagg

SEQ ID NO: 363 - DNA, 50 bp, synthetic construct
  source 1..50: mol_type = other DNA
tccccttccacactgtggaagctttgttcttttgctctttgcaataaatc

SEQ ID NO: 364 - DNA, 50 bp, synthetic construct
  source 1..50: mol_type = other DNA
ttgctactgctcactccttaggtccacgctgcttttatgagctgtaacac

SEQ ID NO: 365 - DNA, 50 bp, synthetic construct
  source 1..50: mol_type = other DNA
tcaccgtgaaggtctgcagcttcactcctgaagccagcaagaccactagc

SEQ ID NO: 366 - DNA, 50 bp, synthetic construct
  source 1..50: mol_type = other DNA
ccaccgggaggaacaaacaacttcagacgtgctgccttaagagctgtaac

SEQ ID NO: 367 - DNA, 50 bp, synthetic construct
  source 1..50: mol_type = other DNA
actcaccgcgaaggtctgcagcttcactcctaagccagcgagaccacaaa

SEQ ID NO: 368 - DNA, 50 bp, synthetic construct
  source 1..50: mol_type = other DNA
cccaccagaaagaagaaactccaaacatatctgaacatcagaaggaacaa

SEQ ID NO: 369 - DNA, 50 bp, synthetic construct
  source 1..50: mol_type = other DNA
actccagacgcgccaccttaagagctgtaacactcaccgcgaaggtccac

SEQ ID NO: 370 - DNA, 50 bp, synthetic construct
  source 1..50: mol_type = other DNA
agcttcattcttgaagtcagtaagaccaagaacccaccaattccagacac

SEQ ID NO: 371 - skipped

SEQ ID NO: 372 - DNA, 50 bp, synthetic construct
  source 1..50: mol_type = other DNA
cgaataggaagagctctggtctgcagctcccagtgtaatcaacccagaag

SEQ ID NO: 373 - DNA, 50 bp, synthetic construct
  source 1..50: mol_type = other DNA
aagggtgatttctgcatttccaactaggtatctggttcatctcattggga

SEQ ID NO: 374 - DNA, 50 bp, synthetic construct
  source 1..50: mol_type = other DNA
ctggttggacagtgggtgcagcccacagagggtgaactgacgcagggcgt

SEQ ID NO: 375 - DNA, 50 bp, synthetic construct
  source 1..50: mol_type = other DNA
ggtgtcaccttagcagggaaatgcaagggatagagggatttccctttcct

SEQ ID NO: 376 - DNA, 50 bp, synthetic construct
  source 1..50: mol_type = other DNA
agccaagggaagccgtgacagattatacctggaaaaacgggacactccca

SEQ ID NO: 377 - DNA, 50 bp, synthetic construct
  source 1..50: mol_type = other DNA
cccaaatactgcgcttttccaaagtcttagcaactggcagacaaggagat

SEQ ID NO: 378 - DNA, 50 bp, synthetic construct
  source 1..50: mol_type = other DNA
actctcccacacctggcttggcaggtcccacgcccagggagccttgctca

SEQ ID NO: 379 - DNA, 50 bp, synthetic construct
  source 1..50: mol_type = other DNA
ctgctagcacagcagtctgagatcaaactgcgaggtggaagcctggcggg

SEQ ID NO: 380 - DNA, 50 bp, synthetic construct
  source 1..50: mol_type = other DNA
gggaggggcgtccaccattgctgaggcttgagtaggtaaacaacgtggct

SEQ ID NO: 381 - DNA, 50 bp, synthetic construct
  source 1..50: mol_type = other DNA
ggggagctcaaaatgggtggagcccaccacagctcaccaaggcctgctgc

SEQ ID NO: 382 - DNA, 50 bp, synthetic construct
  source 1..50: mol_type = other DNA
ctctagactccacctctgtgggcagggcttagctgaacaaaatgcagcag

SEQ ID NO: 383 - DNA, 50 bp, synthetic construct
  source 1..50: mol_type = other DNA
acaacttttgcagacttaaatgtccctgtctgacagctctgaagagagca

SEQ ID NO: 384 - DNA, 50 bp, synthetic construct
  source 1..50: mol_type = other DNA
gtggttctcccaacatggcgtttgagctctgagaaccaacagactgcctc

SEQ ID NO: 385 - DNA, 50 bp, synthetic construct
  source 1..50: mol_type = other DNA
ctcaagtgggtccttgacccccgtttagcctaactgggagacacctccca

SEQ ID NO: 386 - DNA, 50 bp, synthetic construct
  source 1..50: mol_type = other DNA
gtaggggagtgcccctctgggacaaagcttccagaggaaggatcaggcag

SEQ ID NO: 387 - DNA, 50 bp, synthetic construct
  source 1..50: mol_type = other DNA
caatatttgctgttctgcattatttgctgttctgcagtttccactggtga

SEQ ID NO: 388 - DNA, 50 bp, synthetic construct
  source 1..50: mol_type = other DNA
cacccaggcaaacagggtctgcagtggacctccagcaaactccaacagac

SEQ ID NO: 389 - DNA, 50 bp, synthetic construct
  source 1..50: mol_type = other DNA
ctgcagctgagcaacctgactgttagaaggaaaactaacaacagaaagga

SEQ ID NO: 390 - DNA, 50 bp, synthetic construct
  source 1..50: mol_type = other DNA
atagcatcaacatcaacaaaaaggacatctacaccgaaaccccatctgta

SEQ ID NO: 391 - DNA, 50 bp, synthetic construct
  source 1..50: mol_type = other DNA
ggtcaccaacgtcaaagaccaaaggtagataaaacaacaaagatggggag

SEQ ID NO: 392 - DNA, 50 bp, synthetic construct
  source 1..50: mol_type = other DNA
aaaacagagcagaaaagctgaaaattctaaaaatcagagcgcctcttctc

SEQ ID NO: 393 - DNA, 50 bp, synthetic construct
  source 1..50: mol_type = other DNA
ctccaaaggattgcagctcctcgccagcaacagaacaaagctggactgag

SEQ ID NO: 394 - DNA, 50 bp, synthetic construct
  source 1..50: mol_type = other DNA
aatgactttgacaagttgacagaagtaggcttcagaaggttggtaataat

SEQ ID NO: 395 - DNA, 50 bp, synthetic construct
  source 1..50: mol_type = other DNA
aaacttctccgaactaaaggagcatgtttgaacccattgcaaggaagcta

SEQ ID NO: 396 - DNA, 50 bp, synthetic construct
  source 1..50: mol_type = other DNA
aaaaccttgaaaaaaaggttagatgaacggctaactagaataaacagtgt

SEQ ID NO: 397 - DNA, 50 bp, synthetic construct
  source 1..50: mol_type = other DNA
agagaaaaccttaaatgacctgatggagctgaaaacccatggcataagaa

SEQ ID NO: 398 - DNA, 50 bp, synthetic construct
  source 1..50: mol_type = other DNA
cttcatgaggcatgcacaagcttcaatagctgattcaatcaagtggaaga

SEQ ID NO: 399 - DNA, 50 bp, synthetic construct
  source 1..50: mol_type = other DNA
aagggtgtcagtgactgaagatcaaattaatgaaataaagcgagaagaca

SEQ ID NO: 400 - DNA, 50 bp, synthetic construct
  source 1..50: mol_type = other DNA
aggttagagaaaaaagagtaaaaagaaatgaacaaagtgtccaagaaata

SEQ ID NO: 401 - DNA, 50 bp, synthetic construct
  source 1..50: mol_type = other DNA
tgggactatgtgaaaagaccaaatctacatttgattggtgtacctgaaag

SEQ ID NO: 402 - DNA, 50 bp, synthetic construct
  source 1..50: mol_type = other DNA
tgatggggagaatggaacaaagttaaaaaacattcttcaggacatgatcc

SEQ ID NO: 403 - DNA, 50 bp, synthetic construct
  source 1..50: mol_type = other DNA
aggagaacttccccaacctagcaaggcaggccaacattcaaattcaggaa

SEQ ID NO: 404 - DNA, 50 bp, synthetic construct
  source 1..50: mol_type = other DNA
acacagagaacaccacaaagatactcctcgagaagagcaaccccaagaca

SEQ ID NO: 405 - DNA, 50 bp, synthetic construct
  source 1..50: mol_type = other DNA
cataattgtaagattcactaaggttgaaatgaaggaaaaaatgttaaggg

SEQ ID NO: 406 - DNA, 50 bp, synthetic construct
  source 1..50: mol_type = other DNA
cagccagagagaaaggtcaggttacctacaaagggaagcccatcagacta

SEQ ID NO: 407 - DNA, 50 bp, synthetic construct
  source 1..50: mol_type = other DNA
acagcagatatcttggcagaaaccctacaagcgagaagagagtgggagcc

SEQ ID NO: 408 - DNA, 50 bp, synthetic construct
  source 1..50: mol_type = other DNA
aatattcaacattcttaaagaaaagaattttcaacccagaatttcatatc

SEQ ID NO: 409 - DNA, 50 bp, synthetic construct
  source 1..50: mol_type = other DNA
cagccaaactaagcctcataagtgaaggagaaataaaatgctttacagac

SEQ ID NO: 410 - DNA, 50 bp, synthetic construct
  source 1..50: mol_type = other DNA
aagcaaatgctgagacattttgtcaccaccaggcctgccttataagagct

SEQ ID NO: 411 - DNA, 50 bp, synthetic construct
  source 1..50: mol_type = other DNA
cctgaaggaagcgctaaacatagaaagaaacaaacagtaccagccactgc

SEQ ID NO: 412 - DNA, 50 bp, synthetic construct
  source 1..50: mol_type = other DNA
aaaaacatgacaaattgtaaagactactgatgctaggaagaaactgtatc

SEQ ID NO: 413 - DNA, 50 bp, synthetic construct
  source 1..50: mol_type = other DNA
aattaatgggcaaaataaccagctagcatcataatgacaggatcaaattc

SEQ ID NO: 414 - DNA, 50 bp, synthetic construct
  source 1..50: mol_type = other DNA
acacataacaatattaaccttaaatgtaaatgggctaaattctccaatta

SEQ ID NO: 415 - DNA, 50 bp, synthetic construct
  source 1..50: mol_type = other DNA
aaagacacagactggcaaattggatagagtcaagacccatcattgtgctg

SEQ ID NO: 416 - DNA, 50 bp, synthetic construct
  source 1..50: mol_type = other DNA
tatttaggaaacccatctcacgtgcagagacacacataggctcaaaataa

SEQ ID NO: 417 - DNA, 50 bp, synthetic construct
  source 1..50: mol_type = other DNA
agggatggaggaagatctaccaagcaaatggaaagcaaaaaaaaagcagg

SEQ ID NO: 418 - DNA, 50 bp, synthetic construct
  source 1..50: mol_type = other DNA
ggttgcaatcctagtctctgataaaagagactttaaaccaacaaagatca

SEQ ID NO: 419 - DNA, 50 bp, synthetic construct
  source 1..50: mol_type = other DNA
aaagagacaaagaaggccattacataatggtaaagggagcaattcaataa

SEQ ID NO: 420 - DNA, 50 bp, synthetic construct
  source 1..50: mol_type = other DNA
gagctaactatcctaaatatacatgcacccaatacaggagcacccacatt

SEQ ID NO: 421 - DNA, 50 bp, synthetic construct
  source 1..50: mol_type = other DNA
caaaaagcaagtccttagagacctacaaagagatttagactccgacacaa

SEQ ID NO: 422 - DNA, 50 bp, synthetic construct
  source 1..50: mol_type = other DNA
taataatgggaggctttaacaccccactgtcaatattagacagatcagca

SEQ ID NO: 423 - DNA, 50 bp, synthetic construct
  source 1..50: mol_type = other DNA
agacagaaggttaacaaggatatccagcacttgaactcagctctgcacca

SEQ ID NO: 424 - DNA, 50 bp, synthetic construct
  source 1..50: mol_type = other DNA
agcatacctaatagccatctgcagaactctccaccccaaatcaacagaat

SEQ ID NO: 425 - DNA, 50 bp, synthetic construct
  source 1..50: mol_type = other DNA
atacatacttctcagcaccacatcgcacttattctaaaattgaccacata

SEQ ID NO: 426 - DNA, 50 bp, synthetic construct
  source 1..50: mol_type = other DNA
attggaagtaaagcactcctcagcaaatataaaagaacagaaatcacaac

SEQ ID NO: 427 - DNA, 50 bp, synthetic construct
  source 1..50: mol_type = other DNA
aaactgtctctcagaccacagtgcaatcaaattagaactcaggattaaga

SEQ ID NO: 428 - DNA, 50 bp, synthetic construct
  source 1..50: mol_type = other DNA
aactcactcaaaaccacacaactacatggaagctgaacaacttgctcctg

SEQ ID NO: 429 - DNA, 50 bp, synthetic construct
  source 1..50: mol_type = other DNA
aatgactactgggtaaataatgaaatgaaggcagaaataaaaatgttctt

SEQ ID NO: 430 - DNA, 50 bp, synthetic construct
  source 1..50: mol_type = other DNA
tgaaaccaatgacaatgacaacaaagacacaaagtaccagaatctctggg

SEQ ID NO: 431 - DNA, 50 bp, synthetic construct
  source 1..50: mol_type = other DNA
acacatttaaagcagtgtgtagaaggaaatatagagcactaaatgcccac

SEQ ID NO: 432 - DNA, 50 bp, synthetic construct
  source 1..50: mol_type = other DNA
aagagaaagtgtgaaagatctaaaaccaatacccttacatcataattaaa

SEQ ID NO: 433 - DNA, 50 bp, synthetic construct
  source 1..50: mol_type = other DNA
agaactagagaagcaagagcaaacacattcaaaagctagcagaaggcaag

SEQ ID NO: 434 - DNA, 50 bp, synthetic construct
  source 1..50: mol_type = other DNA
aaataactaagatcagagcagaactcaaggagatagagacacaaaaagcc

SEQ ID NO: 435 - DNA, 50 bp, synthetic construct
  source 1..50: mol_type = other DNA
cttcaaaaaatcaatgaatccaggatttggttttttgaaaagatctacaa

SEQ ID NO: 436 - DNA, 50 bp, synthetic construct
  source 1..50: mol_type = other DNA
aattgatagaccactagcaagactaataaagaagaaaagagagaagaatc

SEQ ID NO: 437 - DNA, 50 bp, synthetic construct
  source 1..50: mol_type = other DNA
aaatagacgcaataaaaaatgataaagggatatcaacaccaatcctgcag

SEQ ID NO: 438 - DNA, 50 bp, synthetic construct
  source 1..50: mol_type = other DNA
aaatacaaactagcatcagagaatactataaacatttctatgcaaataaa

SEQ ID NO: 439 - DNA, 50 bp, synthetic construct
  source 1..50: mol_type = other DNA
ctagaaaatctagaagaaatggataaattcctggacacatacaccctccc

SEQ ID NO: 440 - DNA, 50 bp, synthetic construct
  source 1..50: mol_type = other DNA
aaaactaaaccaggaagaatttgaatctctgaatagtacaataacagttt

SEQ ID NO: 441 - DNA, 50 bp, synthetic construct
  source 1..50: mol_type = other DNA
ctgaaattgaggcaataattaatagcttaccaaccaaaaaactccaggac

SEQ ID NO: 442 - DNA, 50 bp, synthetic construct
  source 1..50: mol_type = other DNA
caggtggattcacagccaaattctaccagaggtacaaagaggagctggta

SEQ ID NO: 443 - DNA, 50 bp, synthetic construct
  source 1..50: mol_type = other DNA
ccattccttctgaaattattccaatcaatagaaaaagaaggaaccctccc

SEQ ID NO: 444 - DNA, 50 bp, synthetic construct
  source 1..50: mol_type = other DNA
taactcattttgtgaggacatcgtcatcctgatatcaaagcctggcagag

SEQ ID NO: 445 - DNA, 50 bp, synthetic construct
  source 1..50: mol_type = other DNA
atataacaaaaaaagagaatttcagaccaatatccctgatgaacatcgat

SEQ ID NO: 446 - DNA, 50 bp, synthetic construct
  source 1..50: mol_type = other DNA
gtgaaaatcctcaataaaatactggcaaactgaatccagcagcacatcaa

SEQ ID NO: 447 - DNA, 50 bp, synthetic construct
  source 1..50: mol_type = other DNA
aaagcttatccaccatgatcaggttggcttcatccctgggatgcaaggct

SEQ ID NO: 448 - DNA, 50 bp, synthetic construct
  source 1..50: mol_type = other DNA
ggctcaacatacacaaatcaataaacataatccaacacataaacagaacg

SEQ ID NO: 449 - DNA, 50 bp, synthetic construct
  source 1..50: mol_type = other DNA
aatgacaaaaaccacatgattatctcaatagatgcagaaaaggccttcaa

SEQ ID NO: 450 - DNA, 50 bp, synthetic construct
  source 1..50: mol_type = other DNA
aaaaattcaacaacccttcatgctaaaaattctcaataaactaggtattc

SEQ ID NO: 451 - DNA, 50 bp, synthetic construct
  source 1..50: mol_type = other DNA
atgtaacttatctcaaaataataagagctatttatgacaaacccatgcaa

SEQ ID NO: 452 - DNA, 50 bp, synthetic construct
  source 1..50: mol_type = other DNA
atatcatactgaatggccaaaaactggaagcattccctttgaaaactgcc

SEQ ID NO: 453 - DNA, 50 bp, synthetic construct
  source 1..50: mol_type = other DNA
acaagacaaggatgccacctctcaccactcctattcaacatagtgttgga

SEQ ID NO: 454 - DNA, 50 bp, synthetic construct
  source 1..50: mol_type = other DNA
agttctggccagggcaatcatgcaagagaaagaaataaatggtattcaat

SEQ ID NO: 455 - DNA, 50 bp, synthetic construct
  source 1..50: mol_type = other DNA
taggaaaagaggaagtcaaactgtctctgtctgcagatgacatgattgta

SEQ ID NO: 456 - DNA, 50 bp, synthetic construct
  source 1..50: mol_type = other DNA
tatttagaaaaaccccatcatttcagccccaaatctccttaagctccagc

SEQ ID NO: 457 - DNA, 50 bp, synthetic construct
  source 1..50: mol_type = other DNA
aaagtctcaggatacaaaatcaatgtgcaaaaatcacaagcattcttata

SEQ ID NO: 458 - DNA, 50 bp, synthetic construct
  source 1..50: mol_type = other DNA
caccaataacagactaacagagagccaaatcatgagcgaactcccattca

SEQ ID NO: 459 - DNA, 50 bp, synthetic construct
  source 1..50: mol_type = other DNA
ttgctacaaagagaataaaatacctagaaatccaacttacaagggatgtg

SEQ ID NO: 460 - DNA, 50 bp, synthetic construct
  source 1..50: mol_type = other DNA
aagaacctcttcaaggagaactacaaaccactgctcaacaaaataaaaga

SEQ ID NO: 461 - DNA, 50 bp, synthetic construct
  source 1..50: mol_type = other DNA
ggacacaaactaatggaagaacaacattccatgctcatggataggaagaa

SEQ ID NO: 462 - DNA, 50 bp, synthetic construct
  source 1..50: mol_type = other DNA
tcaatatcatgaaaatggccatactgcccaaggtaatttatagattcaac

SEQ ID NO: 463 - DNA, 50 bp, synthetic construct
  source 1..50: mol_type = other DNA
gccatccccatcaagctaccaatgactttcttcacagaattggaaaaaac

SEQ ID NO: 464 - DNA, 50 bp, synthetic construct
  source 1..50: mol_type = other DNA
tactttaaagttcatatggaaccaaaaaagagcccacattgccaagaaaa

SEQ ID NO: 465 - DNA, 50 bp, synthetic construct
  source 1..50: mol_type = other DNA
tcctaagtaaaaagaacaaagctggaggcatcatgttacctgacttcaaa

SEQ ID NO: 466 - DNA, 50 bp, synthetic construct
  source 1..50: mol_type = other DNA
ctgtactacaaagctacagtaaccaaaacagcatggtcctggtgccaaaa

SEQ ID NO: 467 - DNA, 50 bp, synthetic construct
  source 1..50: mol_type = other DNA
cagatacatagaccaatggaacagaagagaggcctcagcaataatgccac

SEQ ID NO: 468 - DNA, 50 bp, synthetic construct
  source 1..50: mol_type = other DNA
atatctacaaccatctgatctttgacaaacctgacaaaaacaagaaatgg

SEQ ID NO: 469 - DNA, 50 bp, synthetic construct
  source 1..50: mol_type = other DNA
ggaaaggattcctatttaataaatggtactgggaaaactgactagccata

SEQ ID NO: 470 - DNA, 50 bp, synthetic construct
  source 1..50: mol_type = other DNA
cgtagaaagctgaaacagatcccttccttacaccttatacaaaaattaat

SEQ ID NO: 471 - DNA, 50 bp, synthetic construct
  source 1..50: mol_type = other DNA
tcaagatggattaaagacttaaatgttagacctaaaaccataaaaaccct

SEQ ID NO: 472 - DNA, 22 bp, synthetic construct
  source 1..22: mol_type = other DNA
agaagaaaacctaggcaatacc

SEQ ID NO: 473 - DNA, 54 bp, synthetic construct
  source 1..54: mol_type = other DNA
tctcctccaaaggattgcagctcctcgccagcaacagaacaaagctggactgag

SEQ ID NO: 474 - DNA, 55 bp, synthetic construct
  source 1..55: mol_type = other DNA
aatgactttgacaagttgacagaagtaggcttcagaaggttggtaataataaact

SEQ ID NO: 475 - skipped

SEQ ID NO: 476 - DNA, 50 bp, synthetic construct
  source 1..50: mol_type = other DNA
gcttagcattgtacttgttggtacatagtaagcaatcattaactgttaaa

SEQ ID NO: 477 - skipped

SEQ ID NO: 478 - DNA, 50 bp, synthetic construct
  source 1..50: mol_type = other DNA
ggccaagctaggtggctcacgcctgtaatcccggcactttgggaggctga

SEQ ID NO: 479 - DNA, 50 bp, synthetic construct
  source 1..50: mol_type = other DNA
ggcgggtggatcacttgaggtcaggagtttgagaccagcctggccaacag

SEQ ID NO: 480 - DNA, 25 bp, synthetic construct
  source 1..25: mol_type = other DNA
agcaaaatcccatctctactgaaaa

SEQ ID NO: 481 - DNA, 50 bp, synthetic construct
  source 1..50: mol_type = other DNA
ataactatatttggagggagaagaaggggaggtggtggtagtatgagctg

SEQ ID NO: 482 - DNA, 50 bp, synthetic construct
  source 1..50: mol_type = other DNA
aatcctcctctgttccttcctagaaggaacacaacgtcctacatcaagaa

SEQ ID NO: 483 - DNA, 50 bp, synthetic construct
  source 1..50: mol_type = other DNA
aaaagacagaagcatatcttggagatatgaaaagaaccaccaggtaaact

SEQ ID NO: 484 - DNA, 50 bp, synthetic construct
  source 1..50: mol_type = other DNA
aaaaagaaaaagagtgttaaaaagtcagcctttaaaaagcaggattggag

SEQ ID NO: 485 - DNA, 21 bp, synthetic construct
  source 1..21: mol_type = other DNA
atgaggaggggtggagtaggg

SEQ ID NO: 486 - DNA, 50 bp, synthetic construct
  source 1..50: mol_type = other DNA
tatgttaatcagcttgatttaatcatttcacaatgcatatgtatatcaaa

SEQ ID NO: 487 - DNA, 50 bp, synthetic construct
  source 1..50: mol_type = other DNA
acatcatcttgtgtaccataaacatatataatttctgtcaactgtactat

SEQ ID NO: 488 - DNA, 12 bp, synthetic construct
  source 1..12: mol_type = other DNA
actaaagctgga

SEQ ID NO: 489 - DNA, 50 bp, synthetic construct
  source 1..50: mol_type = other DNA
atttaagctccatgaatttctggatttctgtcttgtttggcactgtgtgc

SEQ ID NO: 490 - DNA, 50 bp, synthetic construct
  source 1..50: mol_type = other DNA
cttgtccttagaactgtgtctggcacatagaaaggactcaacatatattc

SEQ ID NO: 491 - skipped

SEQ ID NO: 492 - DNA, 50 bp, synthetic construct
  source 1..50: mol_type = other DNA
gctgggcgtagtggctcatatctgtaatcccagtacttcaggaggccgag

SEQ ID NO: 493 - DNA, 50 bp, synthetic construct
  source 1..50: mol_type = other DNA
aagggaggattgcttaaacccaggaatttgagaccagcatggacaaaata

SEQ ID NO: 494 - DNA, 50 bp, synthetic construct
  source 1..50: mol_type = other DNA
gcgagaccccagtctctacaaaaaatttaaaaattagctgggcatggtgg

SEQ ID NO: 495 - DNA, 50 bp, synthetic construct
  source 1..50: mol_type = other DNA
cacatgcctgtggtcccagctcttcaggaggccgaggtaggaggttcact

SEQ ID NO: 496 - DNA, 50 bp, synthetic construct
  source 1..50: mol_type = other DNA
tgagcctgggaggttgaggcttcagtgagcagcgattgtgccactgcagt

SEQ ID NO: 497 - DNA, 50 bp, synthetic construct
  source 1..50: mol_type = other DNA
ccagtctaggcaacaaagcaagactgtctcaaaaaaggaaaaaaaaaata

SEQ ID NO: 498 - DNA, 10 bp, synthetic construct
  source 1..10: mol_type = other DNA
gaaagagaaa

SEQ ID NO: 499 - DNA, 50 bp, synthetic construct
  source 1..50: mol_type = other DNA
ggagggaaggggtcctaactaagaaagggcagataggatgcttttgcagt

SEQ ID NO: 500 - DNA, 50 bp, synthetic construct
  source 1..50: mol_type = other DNA
gctgccagtgttctatttcttgaccacccactaggttaaacgtgttcacc

SEQ ID NO: 501 - DNA, 50 bp, synthetic construct
  source 1..50: mol_type = other DNA
ttgagataaatcactaaagttgcagcattaatatttgtgtacttttttag

SEQ ID NO: 502 - DNA, 39 bp, synthetic construct
  source 1..39: mol_type = other DNA
ctatgggattcttcaacttaaaaaaggctaatgtaaaaa

SEQ ID NO: 503 - DNA, 50 bp, synthetic construct
  source 1..50: mol_type = other DNA
ggctgggtgtggtggctcacacctataatcccagcactttgggaggtcca

SEQ ID NO: 504 - DNA, 50 bp, synthetic construct
  source 1..50: mol_type = other DNA
ggtatttggggacaagccttggcaacatagggagaccccatctctacaaa

SEQ ID NO: 505 - DNA, 50 bp, synthetic construct
  source 1..50: mol_type = other DNA
aattttaaaaagtaaaataaaattaaaattttgccaggtgtggtggtgca

SEQ ID NO: 506 - DNA, 50 bp, synthetic construct
  source 1..50: mol_type = other DNA
tgcctgtagtcccacctacttgggtggctgaggtgggaggatagcttggg

SEQ ID NO: 507 - DNA, 50 bp, synthetic construct
  source 1..50: mol_type = other DNA
accaggaagtcgaggctgcagtgagccatgattgcgccactgcattccag

SEQ ID NO: 508 - DNA, 50 bp, synthetic construct
  source 1..50: mol_type = other DNA
cctgtgtgacagagcgacaccacatctcaaaacaaacaaacaaaacaaaa

SEQ ID NO: 509 - skipped

SEQ ID NO: 510 - DNA, 50 bp, synthetic construct
  source 1..50: mol_type = other DNA
ggccgggcgcggtggctcacggctgtaatcctagcactttgggagtccga

SEQ ID NO: 511 - DNA, 50 bp, synthetic construct
  source 1..50: mol_type = other DNA
ggcaggcaaatcatgaggtcaggagatcgagaccatcctggctcacacgg

SEQ ID NO: 512 - DNA, 50 bp, synthetic construct
  source 1..50: mol_type = other DNA
tgaaaccccatctctactaaaaaaatacaaaaacttagccaggcgttgtg

SEQ ID NO: 513 - DNA, 50 bp, synthetic construct
  source 1..50: mol_type = other DNA
gtgggcgcctgtagtcccagctactcaggaggctgaggcaggagaacagc

SEQ ID NO: 514 - DNA, 50 bp, synthetic construct
  source 1..50: mol_type = other DNA
gtgaacccaggaggcagagcttgcagtgagccgagatggcgccactgcac

SEQ ID NO: 515 - DNA, 49 bp, synthetic construct
  source 1..49: mol_type = other DNA
tccagcctgggtgacagagcgagactccatctcaaaaaaaaaaagaaaa

SEQ ID NO: 516 - DNA, 50 bp, synthetic construct
  source 1..50: mol_type = other DNA
ggccgggcgcggtggctcacgcctgtaatcccagcactttgggaggccga

SEQ ID NO: 517 - DNA, 50 bp, synthetic construct
  source 1..50: mol_type = other DNA
ggcgggcggatcacgaggtcaggagatcgagaccatcccggctaaaacgg

SEQ ID NO: 518 - DNA, 50 bp, synthetic construct
  source 1..50: mol_type = other DNA
tgaaaccccgtctctactaaaaatacaaaaaattagccgggcgtagtggc

SEQ ID NO: 519 - DNA, 50 bp, synthetic construct
  source 1..50: mol_type = other DNA
gggcgcctgtagtcccagctacttgggaggctgaggcaggagaatggcgt

SEQ ID NO: 520 - DNA, 50 bp, synthetic construct
  source 1..50: mol_type = other DNA
gaacccgggaggcggagcttgcagtgagccgagatcccgccactgcactc

SEQ ID NO: 521 - DNA, 50 bp, synthetic construct
  source 1..50: mol_type = other DNA
cagcctgggcgacagagcgagactccgtctcaaaaaaaaaaaaaaaaaaa

SEQ ID NO: 522 - DNA, 50 bp, synthetic construct
  source 1..50: mol_type = other DNA
ggctcacagaatttcttaaaaagtcattgtgttcagtctttatggatcct

SEQ ID NO: 523 - DNA, 50 bp, synthetic construct
  source 1..50: mol_type = other DNA
ctaaattccagctgctcagcctcccggagctaaatgagatcacttaaagg

SEQ ID NO: 524 - DNA, 50 bp, synthetic construct
  source 1..50: mol_type = other DNA
tcgactgttggggcctccaaggtcgcctcggagactcacctcataggcaa

SEQ ID NO: 525 - DNA, 17 bp, synthetic construct
  source 1..17: mol_type = other DNA
tcaaatggatcgctggg

SEQ ID NO: 526 - DNA, 50 bp, synthetic construct
  source 1..50: mol_type = other DNA
atcatgaaatactattcagccataaaaaggaacaaaataatggcattcac

SEQ ID NO: 527 - DNA, 50 bp, synthetic construct
  source 1..50: mol_type = other DNA
agcaacctggatggaattggagaccattattctaagtgaagtaactcagg

SEQ ID NO: 528 - DNA, 50 bp, synthetic construct
  source 1..50: mol_type = other DNA
aatggaaaaccaaacatcatatgttctcactcataagtgggagctaagct

SEQ ID NO: 529 - DNA, 50 bp, synthetic construct
  source 1..50: mol_type = other DNA
atgatgactcaaaggcataagagtgacacagtggactttggggacttggg

SEQ ID NO: 530 - DNA, 50 bp, synthetic construct
  source 1..50: mol_type = other DNA
ggaaagtgtgagtgggggggtgagggataaaagactacacattgggcaca

SEQ ID NO: 531 - DNA, 50 bp, synthetic construct
  source 1..50: mol_type = other DNA
gcgtacactgttcgggtgatgggtgcaccaaagtcttagaaatcaccact

SEQ ID NO: 532 - DNA, 50 bp, synthetic construct
  source 1..50: mol_type = other DNA
aaagaacttattcatgtaaccaaacaccacctgttccccaaaaacctatg

SEQ ID NO: 533 - DNA, 50 bp, synthetic construct
  source 1..50: mol_type = other DNA
aaataaaaaacatgtaaaaaaaagttttcttttctaatcatgttagggca

SEQ ID NO: 534 - DNA, 50 bp, synthetic construct
  source 1..50: mol_type = other DNA
accatggaatactactcaaccataaaaaggaacgaaataatgacattcac

SEQ ID NO: 535 - DNA, 50 bp, synthetic construct
  source 1..50: mol_type = other DNA
agcaacctggatggaattggagaccattattctaagtgaagtaactcaag

SEQ ID NO: 536 - DNA, 50 bp, synthetic construct
  source 1..50: mol_type = other DNA
aatggaaaaccaaatatcttacattctcactcatatgtaggagctaagct

SEQ ID NO: 537 - DNA, 50 bp, synthetic construct
  source 1..50: mol_type = other DNA
atgaggacacaaaagcataagaatgatacattgaacttttgggacttggg

SEQ ID NO: 538 - DNA, 50 bp, synthetic construct
  source 1..50: mol_type = other DNA
ggaaagagttgggggtggcaagggataaaagactacacattggatacagt

SEQ ID NO: 539 - DNA, 50 bp, synthetic construct
  source 1..50: mol_type = other DNA
gtacactgctcaggtgatggtgcaccaaaatctcagaaatcaccactaaa

SEQ ID NO: 540 - DNA, 50 bp, synthetic construct
  source 1..50: mol_type = other DNA
gaacttactcgtataaccaaacaccacctgttccccacaaatctattgaa

SEQ ID NO: 541 - DNA, 50 bp, synthetic construct
  source 1..50: mol_type = other DNA
ataaacaagaataacaatttaaaaaaaaagaatcactgctctcaaggtag

SEQ ID NO: 542 - DNA, 50 bp, synthetic construct
  source 1..50: mol_type = other DNA
atcatggaatactactcagccataaaaaggaacaaaataatggcatttgc

SEQ ID NO: 543 - DNA, 50 bp, synthetic construct
  source 1..50: mol_type = other DNA
agcaacatggatggaactggaggctattattctaagtgaagtaactcaag

SEQ ID NO: 544 - DNA, 50 bp, synthetic construct
  source 1..50: mol_type = other DNA
aatggaaaaccaatcatcgtatgttctcactcatatgtgggagctaagct

SEQ ID NO: 545 - DNA, 50 bp, synthetic construct
  source 1..50: mol_type = other DNA
atgaggaagcaaaggcttaagaatgatacattggactttggggacttggg

SEQ ID NO: 546 - DNA, 50 bp, synthetic construct
  source 1..50: mol_type = other DNA
gggaaagaatgggggtggcaagggataaaagactacacattaggtacagt

SEQ ID NO: 547 - DNA, 50 bp, synthetic construct
  source 1..50: mol_type = other DNA
gtgcactgctcaggtgatgggtgcaccaaaatctcaggaatcaccactaa

SEQ ID NO: 548 - DNA, 50 bp, synthetic construct
  source 1..50: mol_type = other DNA
agaatgtattcatctaaccaaacaccacctgttccccaaacacctattga

SEQ ID NO: 549 - skipped

SEQ ID NO: 550 - DNA, 50 bp, synthetic construct
  source 1..50: mol_type = other DNA
accatagaatactactcagccataaaaaggaacaaaataatggcattcgc

SEQ ID NO: 551 - DNA, 50 bp, synthetic construct
  source 1..50: mol_type = other DNA
agctacctggatggaattggagaccattattctaagtgaagtaactcagg

SEQ ID NO: 552 - DNA, 50 bp, synthetic construct
  source 1..50: mol_type = other DNA
aatggaaaactaagcatcgtatgttctctcttataagtgggagctaagct

SEQ ID NO: 553 - DNA, 50 bp, synthetic construct
  source 1..50: mol_type = other DNA
acgaggatgcaaaggcataagaatgatacaatgaactctggggactcagg

SEQ ID NO: 554 - DNA, 50 bp, synthetic construct
  source 1..50: mol_type = other DNA
ggaaagggtaggagagggtgagggataaaagactacacattgggtacagt

SEQ ID NO: 555 - DNA, 50 bp, synthetic construct
  source 1..50: mol_type = other DNA
gtacactgctcggtgatgggtgcaccaaaatcacagaaatcaccactaaa

SEQ ID NO: 556 - DNA, 50 bp, synthetic construct
  source 1..50: mol_type = other DNA
aaatttattcatgtaaccaaacaccacttgttcccccaaaacctattgaa

SEQ ID NO: 557 - DNA, 22 bp, synthetic construct
  source 1..22: mol_type = other DNA
attttaaaaacgtaaaaataat

SEQ ID NO: 558 - DNA, 50 bp, synthetic construct
  source 1..50: mol_type = other DNA
accagggaatactactccgccataagaaggaacaaaataatggcatttgc

SEQ ID NO: 559 - DNA, 50 bp, synthetic construct
  source 1..50: mol_type = other DNA
agcaacctggatggaactggagaccattattctaagtgaagtaactcagg

SEQ ID NO: 560 - DNA, 50 bp, synthetic construct
  source 1..50: mol_type = other DNA
aatggaaaaccaaacaccatatgttctcactcataagtgggagctaagct

SEQ ID NO: 561 - DNA, 50 bp, synthetic construct
  source 1..50: mol_type = other DNA
atgaggatgcaaaggcataagtatgatacagtggactttggggactcagg

SEQ ID NO: 562 - DNA, 50 bp, synthetic construct
  source 1..50: mol_type = other DNA
ggtaaagggtgatagatgggtgagggataaaagactacacattgggtaca

SEQ ID NO: 563 - DNA, 50 bp, synthetic construct
  source 1..50: mol_type = other DNA
gtgtacactgcttgggtgatgagtgcaccaaaatctcagaaatcaccaca

SEQ ID NO: 564 - DNA, 50 bp, synthetic construct
  source 1..50: mol_type = other DNA
aaagaacttatccatgtaaccaaacaccacctgttcccccaaaacctatt

SEQ ID NO: 565 - DNA, 16 bp, synthetic construct
  source 1..16: mol_type = other DNA
gagataaaaaataaaa

SEQ ID NO: 566 - DNA, 50 bp, synthetic construct
  source 1..50: mol_type = other DNA
acaatggaatactacttaggaataaaaaggaacaaaataatggcttttgc

SEQ ID NO: 567 - DNA, 50 bp, synthetic construct
  source 1..50: mol_type = other DNA
agcaacctggatagaattggagactattattctgagtgaagtaactcagg

SEQ ID NO: 568 - DNA, 50 bp, synthetic construct
  source 1..50: mol_type = other DNA
aatggaaaactaaacatcatatgttatcactcatatgtgggagttaagct

SEQ ID NO: 569 - DNA, 50 bp, synthetic construct
  source 1..50: mol_type = other DNA
atgagtatgcaaagccgtaagaatgatacattggactttggggacttgaa

SEQ ID NO: 570 - DNA, 50 bp, synthetic construct
  source 1..50: mol_type = other DNA
ggaaagggtgggggtggcaagtgataaaagactacacattcagtacagtg

SEQ ID NO: 571 - DNA, 50 bp, synthetic construct
  source 1..50: mol_type = other DNA
tacactgctcaggtgatgaatgcaccaaaatctcagaaatcaccactgaa

SEQ ID NO: 572 - DNA, 50 bp, synthetic construct
  source 1..50: mol_type = other DNA
gaacttattcatgtaaccaaacaccacctgttccccaaaaccctattgaa

SEQ ID NO: 573 - skipped

SEQ ID NO: 574 - DNA, 30 bp, synthetic construct
  source 1..30: mol_type = other DNA
ggaacaggtggtgtttggttacatgagtaa

SEQ ID NO: 575 - DNA, 30 bp, synthetic construct
  source 1..30: mol_type = other DNA
gaacaggtggtgtttggttacatgaataag

SEQ ID NO: 576 - DNA, 30 bp, synthetic construct; identical to SEQ ID NO: 575
  source 1..30: mol_type = other DNA

SEQ ID NO: 577 - DNA, 50 bp, synthetic construct
  source 1..50: mol_type = other DNA
tgaaaaatcagaataatttttaaacaaatacgatcatagagaaatatgac

SEQ ID NO: 578 - DNA, 50 bp, synthetic construct
  source 1..50: mol_type = other DNA
aatgaaaaagaataatttttcttgcctacagtaagtggaattcatatata

SEQ ID NO: 579 - DNA, 50 bp, synthetic construct
  source 1..50: mol_type = other DNA
gccaggcatagtggcatgtagtcccagctacttgggaggctgaggtggga

SEQ ID NO: 580 - DNA, 50 bp, synthetic construct
  source 1..50: mol_type = other DNA
agatggattgagcccaggaggttaaggctgcagtgagcgtgatcgcacca

SEQ ID NO: 581 - DNA, 50 bp, synthetic construct
  source 1..50: mol_type = other DNA
ctgcagtccagcctgggtgaaagagcaagaccctgtctcaaaaaaataaa

SEQ ID NO: 582 - DNA, 50 bp, synthetic construct
  source 1..50: mol_type = other DNA
aaattaaaaaaagacaatctgcttcccattcctaaggcccaggtacttct

SEQ ID NO: 583 - DNA, 50 bp, synthetic construct
  source 1..50: mol_type = other DNA
gtggcatgcacctgtagtcccagctacttgggaggctggtgggagggtgg

SEQ ID NO: 584 - DNA, 50 bp, synthetic construct
  source 1..50: mol_type = other DNA
cttgagcctgggaagcgtaggttgcagtgaccaagattgtaccactgcac

SEQ ID NO: 585 - DNA, 50 bp, synthetic construct
  source 1..50: mol_type = other DNA
tcaagcctgggcaacacagcaaaaccctgtctcaaaaaagaaaaagaaaa

SEQ ID NO: 586 - DNA, 50 bp, synthetic construct
  source 1..50: mol_type = other DNA
gccgggcatagtggcatgcacctgtattcccagctacttggaaggctgag

SEQ ID NO: 587 - DNA, 50 bp, synthetic construct
  source 1..50: mol_type = other DNA
acaggagaatcacttgaaccaggaggtggaggttgcaagtgagctgagat

SEQ ID NO: 588 - DNA, 50 bp, synthetic construct
  source 1..50: mol_type = other DNA
tgtgccactatactccagcctgggcaacaaagtaaaactctgtctcaaaa

SEQ ID NO: 589 - DNA, 50 bp, synthetic construct
  source 1..50: mol_type = other DNA
aaaaaaaaaaaaaagagagagagagagagaggaaaaataaataaattagt

SEQ ID NO: 590 - DNA, 50 bp, synthetic construct
  source 1..50: mol_type = other DNA
caggtgtggtggtatgcacctgtggtcccagctactcaggaggctaaggc

SEQ ID NO: 591 - DNA, 50 bp, synthetic construct
  source 1..50: mol_type = other DNA
gggaggattcccagagcccaggaagtcaaggctgcagtgagcagtgattg

SEQ ID NO: 592 - DNA, 50 bp, synthetic construct
  source 1..50: mol_type = other DNA
caccactgcactccagcctgggcaacagagcaagagcatatctcaaaaaa

SEQ ID NO: 593 - DNA, 10 bp, synthetic construct
  source 1..10: mol_type = other DNA
gaggaaagaa

SEQ ID NO: 594 - DNA, 50 bp, synthetic construct
  source 1..50: mol_type = other DNA
cagtggctcacacctgtaatcccagtactttgggagggcgaggcgggcgg

SEQ ID NO: 595 - DNA, 50 bp, synthetic construct
  source 1..50: mol_type = other DNA
atcacttgaggtcaggagttcaagaccagcttgaccaacatggtgaaacc

SEQ ID NO: 596 - DNA, 50 bp, synthetic construct
  source 1..50: mol_type = other DNA
ccgtctctaccaaaatacaaaacttaggtgggtgtggtggtgtgcacctg

SEQ ID NO: 597 - DNA, 50 bp, synthetic construct
  source 1..50: mol_type = other DNA
tgactcacacctgtaatcccagtactttgggaggccaaggcaggcggatc

SEQ ID NO: 598 - DNA, 50 bp, synthetic construct
  source 1..50: mol_type = other DNA
acttgaggccaggagtttgagaccagcttgggcaacatagtgaaaccctg

SEQ ID NO: 599 - DNA, 50 bp, synthetic construct
  source 1..50: mol_type = other DNA
tctctttaaaaagtatatgtaaatattattagtcaggcatgatggtgtgt

SEQ ID NO: 600 - DNA, 50 bp, synthetic construct
  source 1..50: mol_type = other DNA
acaggctgggcatggtggcccatgcctgtaatcctagtactttgggaggc

SEQ ID NO: 601 - DNA, 50 bp, synthetic construct
  source 1..50: mol_type = other DNA
tgaggcaggaggattgcttgagcccaggagttcgagaccagcttgagcaa

SEQ ID NO: 602 - DNA, 50 bp, synthetic construct
  source 1..50: mol_type = other DNA
cacagtgagacctcatctctacaaaaaactttaaaaatcagcggggcata

SEQ ID NO: 603 - DNA, 50 bp, synthetic construct
  source 1..50: mol_type = other DNA
ccaccatcattcttcacagaactagaaaaaacaatcctaaaattcttatg

SEQ ID NO: 604 - DNA, 50 bp, synthetic construct
  source 1..50: mol_type = other DNA
gaatcaagagagagcccacatagccaaagcaagactaagcaaaaagaaca

SEQ ID NO: 605 - DNA, 50 bp, synthetic construct
  source 1..50: mol_type = other DNA
aatctggaggcatcagattaattacctaactgcaaactatattataaggc

SEQ ID NO: 606 - DNA, 50 bp, synthetic construct
  source 1..50: mol_type = other DNA
catcgtcaccaaaacagcatagtactggtataaaaataagcacatagacc

SEQ ID NO: 607 - DNA, 50 bp, synthetic construct
  source 1..50: mol_type = other DNA
aatggaatagaataaggaacccagaaataaacccaaatacttacagccaa

SEQ ID NO: 608 - DNA, 50 bp, synthetic construct
  source 1..50: mol_type = other DNA
ctgatttttgacatagcaaacaaaaaataaagtggggaaaagacactgat

SEQ ID NO: 609 - DNA, 50 bp, synthetic construct
  source 1..50: mol_type = other DNA
tcaacaaatggtgctgggataactggcaagccacatgtagaagaataaaa

SEQ ID NO: 610 - DNA, 50 bp, synthetic construct
  source 1..50: mol_type = other DNA
cagaatcctcatctctcaccttatacaaaaatcaactcaagatggattaa

SEQ ID NO: 611 - DNA, 50 bp, synthetic construct
  source 1..50: mol_type = other DNA
agacttaaatctaagacccaaaaccataaagagtctagaagataacattg

SEQ ID NO: 612 - DNA, 50 bp, synthetic construct
  source 1..50: mol_type = other DNA
gaaaaaacccttctagacattgacttaggcaaagacttcatgaccaagaa

SEQ ID NO: 613 - DNA, 50 bp, synthetic construct
  source 1..50: mol_type = other DNA
cccaaaagcaaatgcaataaaaacaaagataaataggtgggacttaatta

SEQ ID NO: 614 - DNA, 50 bp, synthetic construct
  source 1..50: mol_type = other DNA
aactaaaaagcttctgcacagcaaaagaaataagcagcagagttaataga

SEQ ID NO: 615 - DNA, 50 bp, synthetic construct
  source 1..50: mol_type = other DNA
caacccacagagtgggagaaaatcttcacaatctatacatctgacagagg

SEQ ID NO: 616 - DNA, 50 bp, synthetic construct
  source 1..50: mol_type = other DNA
actaatatccagaatcaacaaagaactcaaatcagcaagaaaaaacaaac

SEQ ID NO: 617 - DNA, 50 bp, synthetic construct
  source 1..50: mol_type = other DNA
aatcccatcaaaaagtgggctaaggacatgaatagacaattctcaaaaga

SEQ ID NO: 618 - DNA, 50 bp, synthetic construct
  source 1..50: mol_type = other DNA
aaatatacaaatggccaacaagcatatggaaaaatgctaaacattactaa

SEQ ID NO: 619 - DNA, 50 bp, synthetic construct
  source 1..50: mol_type = other DNA
ttatcagggaaaccacaatgtgtacttcactcctacaagaatggccataa

SEQ ID NO: 620 - DNA, 50 bp, synthetic construct
  source 1..50: mol_type = other DNA
tcaaaaagtcaaaaataatagatattggcaggggtacagtgaaaagggaa

SEQ ID NO: 621 - DNA, 50 bp, synthetic construct
  source 1..50: mol_type = other DNA
cacttttacactgttggtgagactgtaaactagtacaaccagtatggaaa

SEQ ID NO: 622 - DNA, 50 bp, synthetic construct
  source 1..50: mol_type = other DNA
acagtgtggagacttcttaaagaactaaaagtagatctaccatttgatcc

SEQ ID NO: 623 - DNA, 50 bp, synthetic construct
  source 1..50: mol_type = other DNA
agcaatcccactactaggtatctacccagaggaaaagaagtcattatacg

SEQ ID NO: 624 - DNA, 50 bp, synthetic construct
  source 1..50: mol_type = other DNA
aaaaagatacttgcacacacatatttattgcagcacaatttgcaattgca

SEQ ID NO: 625 - DNA, 50 bp, synthetic construct
  source 1..50: mol_type = other DNA
aaaatatggaaccagcccaaatgtgcgtcaatcaacaagtggataaagaa

SEQ ID NO: 626 - DNA, 50 bp, synthetic construct
  source 1..50: mol_type = other DNA
aatgtggtgaatatatataccgtggaatactactcagctataaaaaagaa

SEQ ID NO: 627 - DNA, 50 bp, synthetic construct
  source 1..50: mol_type = other DNA
ccaccatcactcttcacaaaactagaaaaaaaaaagacctaaaatacata

SEQ ID NO: 628 - DNA, 50 bp, synthetic construct
  source 1..50: mol_type = other DNA
tggaaccaaaaaagagcccacatagccgaagcaagactaagcaaaaagaa

SEQ ID NO: 629 - DNA, 50 bp, synthetic construct
  source 1..50: mol_type = other DNA
taaatctggaggcatcacattacctgacttcagactatgctataaggcca

SEQ ID NO: 630 - DNA, 50 bp, synthetic construct
  source 1..50: mol_type = other DNA
tagtagccaaaatagcttggtactgatataaaaataggcccatagaccaa

SEQ ID NO: 631 - DNA, 50 bp, synthetic construct
  source 1..50: mol_type = other DNA
tggaactggatagagaacctagaaataaagccaaatacttacagccaact

SEQ ID NO: 632 - DNA, 50 bp, synthetic construct
  source 1..50: mol_type = other DNA
gatctttgacaaagcaaacaaaaatataaagtagggaaaggacaccctat

SEQ ID NO: 633 - DNA, 50 bp, synthetic construct
  source 1..50: mol_type = other DNA
tcaacaaatggtgctgggataattggcaagccacatgtaaaagaatgaaa

SEQ ID NO: 634 - DNA, 50 bp, synthetic construct
  source 1..50: mol_type = other DNA
tgggaacctcatctctcaccctataaaaaatcaactcaagatggatcaaa

SEQ ID NO: 635 - DNA, 50 bp, synthetic construct
  source 1..50: mol_type = other DNA
tacctaatctaatacctgaaaccataaagattctagaagataacatgaaa

SEQ ID NO: 636 - DNA, 50 bp, synthetic construct
  source 1..50: mol_type = other DNA
aaccctgctagacattggcttaggcaaagacttcatgacaaagaacccaa

SEQ ID NO: 637 - DNA, 50 bp, synthetic construct
  source 1..50: mol_type = other DNA
aagcaaatgcaacaaaaacaaaagataaatagttaggactcaattaaact

SEQ ID NO: 638 - DNA, 50 bp, synthetic construct
  source 1..50: mol_type = other DNA
aaaaagcttttgcacagcaaaagaaataatcagcagagttaacagacaac

SEQ ID NO: 639 - DNA, 50 bp, synthetic construct
  source 1..50: mol_type = other DNA
ccacagagtgggagaaaatcttcagaatctatacatctgacaaaggacta

SEQ ID NO: 640 - DNA, 50 bp, synthetic construct
  source 1..50: mol_type = other DNA
atatccagaatctacaaagaactcaaacaaatcaacaagaaaaaagcaaa

SEQ ID NO: 641 - DNA, 50 bp, synthetic construct
  source 1..50: mol_type = other DNA
taatcccatcaaaaagtgggctaaggacatgaatagacaattcttaaaag

SEQ ID NO: 642 - DNA, 50 bp, synthetic construct
  source 1..50: mol_type = other DNA
aggaattacaaatggccagtaagcatatggaaaaatgctcagcatcacta

SEQ ID NO: 643 - DNA, 50 bp, synthetic construct
  source 1..50: mol_type = other DNA
attatcagggaatacaaatcaaaaccacagtgtaataccatctcactcct

SEQ ID NO: 644 - DNA, 50 bp, synthetic construct
  source 1..50: mol_type = other DNA
gcaagaatggccataatcaaaagatcaaaaaataatagatgttggcatgg

SEQ ID NO: 645 - DNA, 50 bp, synthetic construct
  source 1..50: mol_type = other DNA
atgcagtgtaaagaggacacttttatactgtcggtgggaatgtaaagtag

SEQ ID NO: 646 - DNA, 50 bp, synthetic construct
  source 1..50: mol_type = other DNA
tacaattactatggaaaactgtggagattccttaaagaactaaaagtaga

SEQ ID NO: 647 - DNA, 50 bp, synthetic construct
  source 1..50: mol_type = other DNA
tctaccatttgatcttgcaatcacactactaattatctacccagagaaaa

SEQ ID NO: 648 - DNA, 50 bp, synthetic construct
  source 1..50: mol_type = other DNA
gtcattatatgaaaaagatatttgcacatgcatgtttatagcagcacaat

SEQ ID NO: 649 - DNA, 50 bp, synthetic construct
  source 1..50: mol_type = other DNA
ttgcaattgcaaaaatatgaaaccagcccaaatgcccatcaatcaacaac

SEQ ID NO: 650 - DNA, 50 bp, synthetic construct
  source 1..50: mol_type = other DNA
tggataaagaaaatgtgatatatatatattccatggtatgtgtgtcacaa

SEQ ID NO: 651 - DNA, 50 bp, synthetic construct
  source 1..50: mol_type = other DNA
ataccaaagaaatacaaaagattattattcaaggctactatgaacaactt

SEQ ID NO: 652 - DNA, 50 bp, synthetic construct
  source 1..50: mol_type = other DNA
tgcatgcataaactagaaaacctagaggaggtggataaacaacgctccta

SEQ ID NO: 653 - DNA, 50 bp, synthetic construct
  source 1..50: mol_type = other DNA
gattaaaccaggaagaaatgcaaactttgaccagaccaataacaagcagc

SEQ ID NO: 654 - DNA, 50 bp, synthetic construct
  source 1..50: mol_type = other DNA
aagattgtaatggtaataaaaaaattgccaacaaaaaaaatccaggacca

SEQ ID NO: 655 - DNA, 50 bp, synthetic construct
  source 1..50: mol_type = other DNA
gatggatttacagctgaattctaccagacattcatagaagaattggtacc

SEQ ID NO: 656 - DNA, 50 bp, synthetic construct
  source 1..50: mol_type = other DNA
aatcctattgacactattccaaaagaagagaaagagggaatcctccttaa

SEQ ID NO: 657 - DNA, 50 bp, synthetic construct
  source 1..50: mol_type = other DNA
atcattctatgaagcaagtatcatcctaatatcaaaaccagggaaggaca

SEQ ID NO: 658 - DNA, 50 bp, synthetic construct
  source 1..50: mol_type = other DNA
taacaaaaaaagaaaactacagaccaatatcccagatgaacatagatgca

SEQ ID NO: 659 - DNA, 50 bp, synthetic construct
  source 1..50: mol_type = other DNA
aaaatcctccacagaatactaacaagccaaatccaacagcatatcaaaaa

SEQ ID NO: 660 - DNA, 50 bp, synthetic construct
  source 1..50: mol_type = other DNA
gataatccaccatgatcaagtgggtttcatagcagagatgcaaggatggc

SEQ ID NO: 661 - DNA, 50 bp, synthetic construct
  source 1..50: mol_type = other DNA
ttaacatacataagtcaataaatgtgatacaccacataaacggaattaaa

SEQ ID NO: 662 - DNA, 50 bp, synthetic construct
  source 1..50: mol_type = other DNA
aacaaaaatcacatgatcatctcaatagatgcagaaaaagcatttgacaa

SEQ ID NO: 663 - DNA, 50 bp, synthetic construct
  source 1..50: mol_type = other DNA
aatccagcattgctttattattaaaaccctcagcaacatcagaatagaag

SEQ ID NO: 664 - DNA, 50 bp, synthetic construct
  source 1..50: mol_type = other DNA
ggacatacctttaggtaataaaaaccatctacgatacacccacagccaac

SEQ ID NO: 665 - DNA, 50 bp, synthetic construct
  source 1..50: mol_type = other DNA
attatactgaatgaggaaaagttgaaagctttccacctgagaactggaac

SEQ ID NO: 666 - DNA, 50 bp, synthetic construct
  source 1..50: mol_type = other DNA
aagacaaggatgcccactttcaccacttctgttaaacttggtactggaag

SEQ ID NO: 667 - DNA, 50 bp, synthetic construct
  source 1..50: mol_type = other DNA
tcctcgccagagcaatcagacaagagaaagaaataaagggcatcctaatc

SEQ ID NO: 668 - DNA, 50 bp, synthetic construct
  source 1..50: mol_type = other DNA
ggtgaaggggaagtcaaactgtcactgtttgctgatgatatgatcgtata

SEQ ID NO: 669 - DNA, 50 bp, synthetic construct
  source 1..50: mol_type = other DNA
cctaaaaatccctaaagacacctccaaaaagccactagaactgataaaag

SEQ ID NO: 670 - DNA, 50 bp, synthetic construct
  source 1..50: mol_type = other DNA
aattcaggaaagtttcaggatgcaagattaatatacacaaatcagtaact

SEQ ID NO: 671 - DNA, 50 bp, synthetic construct
  source 1..50: mol_type = other DNA
ctgctatacaccaacagcaaccaagctgagaatcaaattgagatatctca

SEQ ID NO: 672 - DNA, 50 bp, synthetic construct
  source 1..50: mol_type = other DNA
acctcttcacaatagctaataaacaaacaaataaaaaaaaaacttaggaa

SEQ ID NO: 673 - DNA, 50 bp, synthetic construct
  source 1..50: mol_type = other DNA
tatacctaaccaaggacatgaaagacctctacaaagaaaactacaaaaca

SEQ ID NO: 674 - DNA, 50 bp, synthetic construct
  source 1..50: mol_type = other DNA
ctgctgaaagaaatcatagataatgcaaacaaatggaaatacagcccatg

SEQ ID NO: 675 - DNA, 50 bp, synthetic construct
  source 1..50: mol_type = other DNA
ctcatggatgggtagaatcaatagtgtgaaaatgaccatactgccaaaag

SEQ ID NO: 676 - DNA, 50 bp, synthetic construct
  source 1..50: mol_type = other DNA
caatctacaaattcaatgcaattcccatcaaaataccaccatcactcttc

SEQ ID NO: 677 - DNA, 50 bp, synthetic construct
  source 1..50: mol_type = other DNA
tattcaaggctactatgaacacctttatgctgataaactagaaaacctag

SEQ ID NO: 678 - DNA, 50 bp, synthetic construct
  source 1..50: mol_type = other DNA
aggacatggatacattcctggaaatatataactctcctagattaaaccaa

SEQ ID NO: 679 - DNA, 50 bp, synthetic construct
  source 1..50: mol_type = other DNA
gaagatatagaaactctgaacagaccaataacaagcagtgagattgaaat

SEQ ID NO: 680 - DNA, 50 bp, synthetic construct
  source 1..50: mol_type = other DNA
ggtaacaaaaaaaatcgtctaccaaaaaaaagtccaggaccagagagatt

SEQ ID NO: 681 - DNA, 50 bp, synthetic construct
  source 1..50: mol_type = other DNA
cacagctgaattctatcaggcattcaaagaagaattgggaccaatcctac

SEQ ID NO: 682 - DNA, 50 bp, synthetic construct
  source 1..50: mol_type = other DNA
tgacactattccaaaagacagagaaagagggaatcctctctaaatcattc

SEQ ID NO: 683 - DNA, 50 bp, synthetic construct
  source 1..50: mol_type = other DNA
tatgaagccagtatcaccctaataccaaaaccagggaaggacattagaaa

SEQ ID NO: 684 - DNA, 50 bp, synthetic construct
  source 1..50: mol_type = other DNA
aaaagaaaactatagaccactatccttgatgaacacagatgcaaaaatcc

SEQ ID NO: 685 - DNA, 50 bp, synthetic construct
  source 1..50: mol_type = other DNA
tcaacgaaatgctagcgaactgaatccaacagcatatcaaaaagataatc

SEQ ID NO: 686 - DNA, 50 bp, synthetic construct
  source 1..50: mol_type = other DNA
catcatgatcaagtgggtttcataccagggatgcagggatggtttagcat

SEQ ID NO: 687 - DNA, 50 bp, synthetic construct
  source 1..50: mol_type = other DNA
atgtaagtcaatcaatgtgatatgccacataaacagaattaaaaacaaaa

SEQ ID NO: 688 - DNA, 50 bp, synthetic construct
  source 1..50: mol_type = other DNA
atcacatgatcatctcaatagatgcagaaaaagcatttgacaaaatccag

SEQ ID NO: 689 - DNA, 50 bp, synthetic construct
  source 1..50: mol_type = other DNA
tatcgctttgtgattaaaaccctcagcaaaatcggcagagaagggacatc

SEQ ID NO: 690 - DNA, 50 bp, synthetic construct
  source 1..50: mol_type = other DNA
cttaaggtagtaaaagctatctatgacaaagccatggccaacattatact

SEQ ID NO: 691 - DNA, 50 bp, synthetic construct
  source 1..50: mol_type = other DNA
gaatgggtaaaagttgaaagcatttcccctatgaactagaacaagacaag

SEQ ID NO: 692 - DNA, 50 bp, synthetic construct
  source 1..50: mol_type = other DNA
gatgcccattcttaccacttctgttcaacatagtactggaattcctagcc

SEQ ID NO: 693 - DNA, 50 bp, synthetic construct
  source 1..50: mol_type = other DNA
agagcaatcagacaagagaaagaaagaaaggacatccaaatcagtaaaga

SEQ ID NO: 694 - DNA, 50 bp, synthetic construct
  source 1..50: mol_type = other DNA
ggaagtcaaactgtcactctttgttgatgatataattgtatacctagaaa

SEQ ID NO: 695 - DNA, 50 bp, synthetic construct
  source 1..50: mol_type = other DNA
accctaaagactcatccaaaaagctcctggaactggtaaatgaattcagc

SEQ ID NO: 696 - DNA, 50 bp, synthetic construct
  source 1..50: mol_type = other DNA
aaagtttcaggatacaaaattaatgtacacaaatcagtagctctgctata

SEQ ID NO: 697 - DNA, 50 bp, synthetic construct
  source 1..50: mol_type = other DNA
caccaacagtgaccaagctgagtatcaaatcaaggactcaacccctttta

SEQ ID NO: 698 - DNA, 50 bp, synthetic construct
  source 1..50: mol_type = other DNA
caatagctgcaaaaaaaaaaaaaaaaaatacttaggaacacacgtaatca

SEQ ID NO: 699 - DNA, 50 bp, synthetic construct
  source 1..50: mol_type = other DNA
aggaggtgaaagacctctacaagtaaaactacaaaacactgctgaaacaa

SEQ ID NO: 700 - DNA, 50 bp, synthetic construct
  source 1..50: mol_type = other DNA
atcagacaacaccaaaaaatggaaacacatcccatgctcatggatgggta

SEQ ID NO: 701 - DNA, 50 bp, synthetic construct
  source 1..50: mol_type = other DNA
gaatcaatattgtgaaaatgaccatactggcaaaagcagtctacaaattc

SEQ ID NO: 702 - DNA, 50 bp, synthetic construct
  source 1..50: mol_type = other DNA
aatgtaattcccatcaaaatacaaccatcattcttcacagaactagaaaa

SEQ ID NO: 703 - DNA, 50 bp, synthetic construct
  source 1..50: mol_type = other DNA
gatatcacagaaatatgaaacattattcaaggctaatatgaacaccttta

SEQ ID NO: 704 - DNA, 50 bp, synthetic construct
  source 1..50: mol_type = other DNA
tggacataaactagaaaacctagaggagatggataaactcctggaagtat

SEQ ID NO: 705 - DNA, 50 bp, synthetic construct
  source 1..50: mol_type = other DNA
acaaccctcctagattaaaccaggaagatgtagaaactctgagcagacca

SEQ ID NO: 706 - DNA, 50 bp, synthetic construct
  source 1..50: mol_type = other DNA
ataacaagcagaaagattgaaatggtaattttaaaattgccaagaaaaag

SEQ ID NO: 707 - DNA, 50 bp, synthetic construct
  source 1..50: mol_type = other DNA
cagtccaggaccagacagattcatagctgaattgtatcagacattcaaag

SEQ ID NO: 708 - DNA, 50 bp, synthetic construct
  source 1..50: mol_type = other DNA
aagaattggtaccaatcctattgacactattccacaagatagacaaagag

SEQ ID NO: 709 - DNA, 50 bp, synthetic construct
  source 1..50: mol_type = other DNA
ggaatcctccctaaattattctatgaaggcagtatcaccctaatactaaa

SEQ ID NO: 710 - DNA, 50 bp, synthetic construct
  source 1..50: mol_type = other DNA
ccaggaaagagcataaccaaaaaagaaaactacagaccaatacacctgat

SEQ ID NO: 711 - DNA, 50 bp, synthetic construct
  source 1..50: mol_type = other DNA
gaacacagatgcaaaaattctcaacaaagtactagtgaactgaatccaac

SEQ ID NO: 712 - DNA, 50 bp, synthetic construct
  source 1..50: mol_type = other DNA
aacataccaaaaatataatctaccatgatcaagtgggtttcataccaggg

SEQ ID NO: 713 - DNA, 50 bp, synthetic construct
  source 1..50: mol_type = other DNA
atgcagggatggtttaacatatgtaactcaataaatgtgatacaccacat

SEQ ID NO: 714 - DNA, 50 bp, synthetic construct
  source 1..50: mol_type = other DNA
aaacagaatcaaaaacaaaaatcacgatcatctcagtagacacagaaaaa

SEQ ID NO: 715 - DNA, 50 bp, synthetic construct
  source 1..50: mol_type = other DNA
gcatttgacaaaattaagcatcccattatgattaaaaccctcagcaaaat

SEQ ID NO: 716 - DNA, 50 bp, synthetic construct
  source 1..50: mol_type = other DNA
cagcatagaaaagacataccttaaggtaataaaagccatctatgacaaac

SEQ ID NO: 717 - DNA, 50 bp, synthetic construct
  source 1..50: mol_type = other DNA
ccacagccaacgttatactgaatggggaaaagctgaaagtgttacccctg

SEQ ID NO: 718 - DNA, 50 bp, synthetic construct
  source 1..50: mol_type = other DNA
agaactgaaacaagacaaggatgcccactttcaccacttctattcaacat

SEQ ID NO: 719 - DNA, 50 bp, synthetic construct
  source 1..50: mol_type = other DNA
agtactggaagtcctagccagagcaatcagacaagagaaagaaataaagg

SEQ ID NO: 720 - DNA, 50 bp, synthetic construct
  source 1..50: mol_type = other DNA
gcatccaaatcagtaaagaggaagtcagaatgtcactgtttgctgatgat

SEQ ID NO: 721 - DNA, 50 bp, synthetic construct
  source 1..50: mol_type = other DNA
ataatcttatacctagaaaaccctaaagactcatccaaaaaactcttaga

SEQ ID NO: 722 - DNA, 50 bp, synthetic construct
  source 1..50: mol_type = other DNA
actggtagatgaattcagcaaagtttcaggatacaaaattaatgtacaca

SEQ ID NO: 723 - DNA, 50 bp, synthetic construct
  source 1..50: mol_type = other DNA
aatcagtagttctcctatacagcaacagtgaccaagctgaaaatcaaatc

SEQ ID NO: 724 - DNA, 50 bp, synthetic construct
  source 1..50: mol_type = other DNA
aagaactcaactgcttttacaatagctacaaaaataaaataaaatactta

SEQ ID NO: 725 - DNA, 50 bp, synthetic construct
  source 1..50: mol_type = other DNA
agaatatatctaaccaaggaggtgaaagacctctacaaggaaaactacaa

SEQ ID NO: 726 - DNA, 50 bp, synthetic construct
  source 1..50: mol_type = other DNA
aatactgctgaaagaaatcatagatggcacaaagaaatggaaacacatcc

SEQ ID NO: 727 - DNA, 50 bp, synthetic construct
  source 1..50: mol_type = other DNA
cgtgctcatagataggtagaatcaatattgtgaaaatgaccatactgcct

SEQ ID NO: 728 - DNA, 50 bp, synthetic construct
  source 1..50: mol_type = other DNA
aaagcaatctataattcaatgcaattcccatggaaataccacgattactc

SEQ ID NO: 729 - DNA, 50 bp, synthetic construct
  source 1..50: mol_type = other DNA
atgggagatattacaactaataccacagaaatacaaggctactatgaaca

SEQ ID NO: 730 - DNA, 50 bp, synthetic construct
  source 1..50: mol_type = other DNA
ccttcacgtgcataaaccagaaaacctggaggagataaatttcaggataa

SEQ ID NO: 731 - DNA, 50 bp, synthetic construct
  source 1..50: mol_type = other DNA
attcctgaaaatatacaaccctcctagattaaaccaggaagatagagaat

SEQ ID NO: 732 - DNA, 50 bp, synthetic construct
  source 1..50: mol_type = other DNA
ctctgaacagaccaataacaagcagcgtgattgaaatagtaatgtaaaaa

SEQ ID NO: 733 - DNA, 50 bp, synthetic construct
  source 1..50: mol_type = other DNA
ttgccaacaaaaaaaaaagtccaggaccagacaaattcacagctgaattc

SEQ ID NO: 734 - DNA, 50 bp, synthetic construct
  source 1..50: mol_type = other DNA
tatcagacatgtaaagaaaattagtaccaatcctattgacactattccgc

SEQ ID NO: 735 - DNA, 50 bp, synthetic construct
  source 1..50: mol_type = other DNA
aagatagacaaagaaggaatcctccctaaatcattttatgaagccagtat

SEQ ID NO: 736 - DNA, 50 bp, synthetic construct
  source 1..50: mol_type = other DNA
caccctaataccaaaaccagggaaggacattaaaaaaacagaaaactaca

SEQ ID NO: 737 - DNA, 50 bp, synthetic construct
  source 1..50: mol_type = other DNA
gaccaatacccttgatcaacacagatgcaaaaatccccaacaaaatacta

SEQ ID NO: 738 - DNA, 50 bp, synthetic construct
  source 1..50: mol_type = other DNA
gtgaactgaagccaagagcatatcaaaaagataatccacatgatcaagtg

SEQ ID NO: 739 - DNA, 50 bp, synthetic construct
  source 1..50: mol_type = other DNA
tgtttcataccagggatgcagggatggtttaacatatatgagtcagtaag

SEQ ID NO: 740 - DNA, 50 bp, synthetic construct
  source 1..50: mol_type = other DNA
tgtgatacaccactaacagaattgaaaacaaaaatcacatgatcatctca

SEQ ID NO: 741 - DNA, 50 bp, synthetic construct
  source 1..50: mol_type = other DNA
atagatgcagaaaaagcatttgacaaaatccagcatcactttatgattaa

SEQ ID NO: 742 - DNA, 50 bp, synthetic construct
  source 1..50: mol_type = other DNA
aaccctcagcaaaatcggcatagaagggacataacttaagggaataaaag

SEQ ID NO: 743 - DNA, 50 bp, synthetic construct
  source 1..50: mol_type = other DNA
ccatccaagacaaacccaccacctacattatgctgaatggggaaaagttg

SEQ ID NO: 744 - DNA, 50 bp, synthetic construct
  source 1..50: mol_type = other DNA
aaagcattccccctgagaactggaacaaaacaagaatgcccactttcacc

SEQ ID NO: 745 - DNA, 50 bp, synthetic construct
  source 1..50: mol_type = other DNA
acttgtattaaacacagtactagaagtcctggctagagcaatcaggcaag

SEQ ID NO: 746 - DNA, 50 bp, synthetic construct
  source 1..50: mol_type = other DNA
agaaagaaataaagggcatccaaattggtaaagaggaagtcaaactgttg

SEQ ID NO: 747 - DNA, 50 bp, synthetic construct
  source 1..50: mol_type = other DNA
ctgtgtgctgatgatatcattgtatacctagaaaaccctagagttatcca

SEQ ID NO: 748 - DNA, 50 bp, synthetic construct
  source 1..50: mol_type = other DNA
gaaagctcctagaactggtaaatgaattcagcaatgtttcaggatacaaa

SEQ ID NO: 749 - DNA, 50 bp, synthetic construct
  source 1..50: mol_type = other DNA
attaatgtacacaaatcagtagctctgctatacaccaacagtgaccaagt

SEQ ID NO: 750 - DNA, 50 bp, synthetic construct
  source 1..50: mol_type = other DNA
tgagaatcaaatcaagaactcaatccctttcgtaatagctgcaaaaaaat

SEQ ID NO: 751 - DNA, 50 bp, synthetic construct
  source 1..50: mol_type = other DNA
gaaatgcttaggaatatacctaaccaaggaggtgaaagacctctacaagg

SEQ ID NO: 752 - DNA, 50 bp, synthetic construct
  source 1..50: mol_type = other DNA
aaaactacaaaacactgctgaaagaaatcatagatgccacagcaaatgga

SEQ ID NO: 753 - DNA, 50 bp, synthetic construct
  source 1..50: mol_type = other DNA
aacacatcccatgctcatgagtgggtagaatcaatattgtgaaaatgacc

SEQ ID NO: 754 - DNA, 50 bp, synthetic construct
  source 1..50: mol_type = other DNA
acactgccaaaaaaaatccacaaatttaatgcaattcccatcaaaatacc

SEQ ID NO: 755 - DNA, 50 bp, synthetic construct
  source 1..50: mol_type = other DNA
accatcattcttcacagaactagaaaaaacaatcctaaaattcatatgga

SEQ ID NO: 756 - DNA, 50 bp, synthetic construct
  source 1..50: mol_type = other DNA
gaggtgagtcaagttagagagctgagccaagcaaaatacaagggtagagg

SEQ ID NO: 757 - DNA, 50 bp, synthetic construct
  source 1..50: mol_type = other DNA
aagcagcagaaaggcgctgggagctcgctggatacccaagcagcccattc

SEQ ID NO: 758 - DNA, 50 bp, synthetic construct
  source 1..50: mol_type = other DNA
ctgcctggtaccacagggatccatcaggagggtggcagaggagcaggaga

SEQ ID NO: 759 - DNA, 50 bp, synthetic construct
  source 1..50: mol_type = other DNA
taaaactccataggaaggaggacttctctagctgaactttgttacaattt

SEQ ID NO: 760 - DNA, 50 bp, synthetic construct
  source 1..50: mol_type = other DNA
gcacggggcaagaagcctcctggccagaactcggggaagggcgtgaatcc

SEQ ID NO: 761 - DNA, 50 bp, synthetic construct; identical to SEQ ID NO: 756
  source 1..50: mol_type = other DNA

SEQ ID NO: 762 - DNA, 50 bp, synthetic construct; identical to SEQ ID NO: 757
  source 1..50: mol_type = other DNA

SEQ ID NO: 763 - DNA, 50 bp, synthetic construct; identical to SEQ ID NO: 758
  source 1..50: mol_type = other DNA

SEQ ID NO: 764 - DNA, 50 bp, synthetic construct; identical to SEQ ID NO: 759
  source 1..50: mol_type = other DNA

SEQ ID NO: 765 - DNA, 33 bp, synthetic construct
  source 1..33: mol_type = other DNA
gcacggggcaagaagcctcctggccagaactcg

SEQ ID NO: 766 - DNA, 50 bp, synthetic construct
  source 1..50: mol_type = other DNA
ttgaatgtgtcccccaaatttcatgtgttggaaatttaatccccaatgtg

SEQ ID NO: 767 - DNA, 50 bp, synthetic construct
  source 1..50: mol_type = other DNA
gcagtattgtgtggtgggccctttaagaggtgattagatcatgagggtgg

SEQ ID NO: 768 - DNA, 50 bp, synthetic construct
  source 1..50: mol_type = other DNA
agcccttatgaatggattaatctcttcatggattcatggattaatgggtt

SEQ ID NO: 769 - DNA, 50 bp, synthetic construct
  source 1..50: mol_type = other DNA
aatggattaatgggttatcttgggagggggactgatggctttataagaag

SEQ ID NO: 770 - DNA, 50 bp, synthetic construct
  source 1..50: mol_type = other DNA
agggagagagaccttagctagcaagggagcagctcagcaccccctccata

SEQ ID NO: 771 - DNA, 50 bp, synthetic construct
  source 1..50: mol_type = other DNA
tgatggcttgtactgcctgggaactctgcaggtgtcccccaccagcaaga

SEQ ID NO: 772 - DNA, 50 bp, synthetic construct
  source 1..50: mol_type = other DNA
aggccctcaccagatgcacactcttgaccttggacttctcagactccata

SEQ ID NO: 773 - DNA, 50 bp, synthetic construct
  source 1..50: mol_type = other DNA
actgtaagaaataacttccttttctttacaaattacccagtttcaggtat

SEQ ID NO: 774 - DNA, 50 bp, synthetic construct
  source 1..50: mol_type = other DNA
tctgttataagcaacagaaaatggactaaaacactatatatctttctaga

SEQ ID NO: 775 - DNA, 50 bp, synthetic construct
  source 1..50: mol_type = other DNA
gaggtgggcagatcacctgaggtcaggagcaagactccatctctaaaaaa

SEQ ID NO: 776 - DNA, 42 bp, synthetic construct
  source 1..42: mol_type = other DNA
aaaaaaagaaacatctcgacagggttaccaaaactggggcat

SEQ ID NO: 777 - DNA, 50 bp, synthetic construct
  source 1..50: mol_type = other DNA
gtggctcacacctgtgatttgtaatcccagcactttgggaagccgaggcg

SEQ ID NO: 778 - DNA, 50 bp, synthetic construct
  source 1..50: mol_type = other DNA
ggtggatcgcctgaggtcaggagttcgagaacagcctggccaacatagtg

SEQ ID NO: 779 - DNA, 50 bp, synthetic construct
  source 1..50: mol_type = other DNA
acaccccgtctctactaaaaatacaaaaaattagctgagcatggtggcgg

SEQ ID NO: 780 - DNA, 50 bp, synthetic construct
  source 1..50: mol_type = other DNA
gcgccagtaatcccagctactcgggaggctgaggcaggagaatcacttga

SEQ ID NO: 781 - DNA, 50 bp, synthetic construct
  source 1..50: mol_type = other DNA
accctggaggtggaggttgcagtgagctgagattgtgccactgcactcca

SEQ ID NO: 782 - DNA, 50 bp, synthetic construct
  source 1..50: mol_type = other DNA
gcctgggcaacaagaacaaaactccatctcagaaaaaaaaaaaaattctt

SEQ ID NO: 783 - DNA, 50 bp, synthetic construct
  source 1..50: mol_type = other DNA
gtggctcacacctgtaatcccagcactttgggaggccgaggcgggtggat

SEQ ID NO: 784 - DNA, 50 bp, synthetic construct
  source 1..50: mol_type = other DNA
cacttgaggtcaggagttcgagaccaacctggccaacatggtgaaacccc

SEQ ID NO: 785 - DNA, 50 bp, synthetic construct
  source 1..50: mol_type = other DNA
atctctactaaaaatacaaaattagctggtcgtggtggcacacgcctgta

SEQ ID NO: 786 - DNA, 50 bp, synthetic construct
  source 1..50: mol_type = other DNA
atcccagctacttgggaggctgaggcaggagaatctcttgaacccaggag

SEQ ID NO: 787 - DNA, 50 bp, synthetic construct
  source 1..50: mol_type = other DNA
gcggaggttgcagtgagctgagatcgcgccattgcattccagcctgggca

SEQ ID NO: 788 - DNA, 50 bp, synthetic construct
  source 1..50: mol_type = other DNA
acgagcaaaactccatctcaaaaaaaaaaaaattattaatttttaaaacc

SEQ ID NO: 789 - DNA, 50 bp, synthetic construct
  source 1..50: mol_type = other DNA
cggtggctcatgcctgtaatcccagcactttgggaggctgaggcgggtgg

SEQ ID NO: 790 - DNA, 50 bp, synthetic construct
  source 1..50: mol_type = other DNA
accacctaaggtcaggagttcaagaccagccttgccaacatggtgaaacc

SEQ ID NO: 791 - DNA, 50 bp, synthetic construct
  source 1..50: mol_type = other DNA
ccgtctctactaaaaatacaaaaaaattagccaggcatggtggtgtgtgc

SEQ ID NO: 792 - DNA, 50 bp, synthetic construct
  source 1..50: mol_type = other DNA
ctgtaataccagctactagggaggctgacacaggggaatctcttgaaccc

SEQ ID NO: 793 - DNA, 50 bp, synthetic construct
  source 1..50: mol_type = other DNA
aggaggtggaggttgcagtgagctgagatcatgccattgcattccagcat

SEQ ID NO: 794 - DNA, 50 bp, synthetic construct
  source 1..50: mol_type = other DNA
gggcaacaagagcaaaactctgtctcaaaaaaaaaaaaattatgtagatg

SEQ ID NO: 795 - DNA, 50 bp, synthetic construct
  source 1..50: mol_type = other DNA
gtggctcatgcctgtaaccccagcactttgggaggctgaggtgggtggat

SEQ ID NO: 796 - DNA, 50 bp, synthetic construct
  source 1..50: mol_type = other DNA
cgcctgaggtcaggagtttgagaccagcctgcccaacatagtgaaactcc

SEQ ID NO: 797 - DNA, 50 bp, synthetic construct
  source 1..50: mol_type = other DNA
atctctactaaaaatacaaaaaaattagctgggcgtggtggcgggcacct

SEQ ID NO: 798 - DNA, 50 bp, synthetic construct
  source 1..50: mol_type = other DNA
ataatctcagctactagggaggctgaggcaggagaatcgcttgaacctgg

SEQ ID NO: 799 - DNA, 50 bp, synthetic construct
  source 1..50: mol_type = other DNA
gaggcggaggttgtgagctgagatcgcaccattgcattccagcctgggca

SEQ ID NO: 800 - DNA, 50 bp, synthetic construct
  source 1..50: mol_type = other DNA
acaagagcaaaactccgtctcaaaaaaaaaaaaaaaagaatttaaaattc

SEQ ID NO: 801 - DNA, 101 bp, synthetic construct
  source 1..101: mol_type = other DNA
aggctggaatgcaatggcacaatctcagctcactgcaacctctgcctcctgggtttaagagattctcctgcctcagcctccctagtagctgggattacagg

SEQ ID NO: 802 - DNA, 50 bp, synthetic construct
  source 1..50: mol_type = other DNA
taaaaataaaagggtggacaaagatttatcaggcaaacaggaaaaataag

SEQ ID NO: 803 - DNA, 50 bp, synthetic construct
  source 1..50: mol_type = other DNA
gcaagaagggtgcttttttccccttctctgtgcagggcacagccagagaa

SEQ ID NO: 804 - DNA, 50 bp, synthetic construct
  source 1..50: mol_type = other DNA
aattaaagaagagaagaattaactgaacttggtaaagaacaactacaaaa

SEQ ID NO: 805 - DNA, 50 bp, synthetic construct
  source 1..50: mol_type = other DNA
aaatataagattttgtagcaacactctttttacatgcaaaagagaaccat

SEQ ID NO: 806 - DNA, 50 bp, synthetic construct
  source 1..50: mol_type = other DNA
ggcaacatagcaagaccctgtctctaggaaaaaaaaaaaaattagccagt

SEQ ID NO: 807 - DNA, 50 bp, synthetic construct
  source 1..50: mol_type = other DNA
tttttaaatttcttttttgagacacagtttcactctgttgcccaggctgg

SEQ ID NO: 808 - DNA, 50 bp, synthetic construct
  source 1..50: mol_type = other DNA
tcattcttttttgagacacagtttcactctgctgcccaggctggggtgca

SEQ ID NO: 809 - DNA, 50 bp, synthetic construct
  source 1..50: mol_type = other DNA
aaaataaatgcaaaaagaacttgagaaagcttcatgtggctcagtatcct

SEQ ID NO: 810 - DNA, 50 bp, synthetic construct
  source 1..50: mol_type = other DNA
gcactcagtaggatatgtggaggatatatataaaatctaattgagattct

SEQ ID NO: 811 - DNA, 50 bp, synthetic construct
  source 1..50: mol_type = other DNA
taggaaaggctttaatgaagactggagaatgaatgatatctgttataaag

SEQ ID NO: 812 - DNA, 50 bp, synthetic construct
  source 1..50: mol_type = other DNA
ttttttgagacacatgacttttttttttttttggagatggagggtcgctc

SEQ ID NO: 813 - DNA, 50 bp, synthetic construct
  source 1..50: mol_type = other DNA
ttttcctcattcttttttgaccaaatgacataaccaaagcttagcatatc

SEQ ID NO: 814 - DNA, 50 bp, synthetic construct
  source 1..50: mol_type = other DNA
gaggctgaggcaggagcatcgcttgagcccaggagttcaagaccagcctg

SEQ ID NO: 815 - DNA, 50 bp, synthetic construct
  source 1..50: mol_type = other DNA
gaggctgaggcaggagtatcgcttgagcccaggagtttgagacaagcctg

SEQ ID NO: 816 - DNA, 50 bp, synthetic construct
  source 1..50: mol_type = other DNA
gacagcatagtgagaccctgtctctacaaaaataaaaaaaaaattagcca

SEQ ID NO: 817 - DNA, 50 bp, synthetic construct
  source 1..50: mol_type = other DNA
tcagctactccagaggctgaggtgggaggattgcttgagcccaggaggtc

SEQ ID NO: 818 - DNA, 50 bp, synthetic construct
  source 1..50: mol_type = other DNA
aaagctgcagtgagcggtgtgattgggccactgcactccagcagcctggg

SEQ ID NO: 819 - DNA, 50 bp, synthetic construct
  source 1..50: mol_type = other DNA
tgacagagtgagaccctgtctcaaaaaaaggaaaaagagaaagaaaaaga

SEQ ID NO: 820 - DNA, 49 bp, synthetic construct
  source 1..49: mol_type = other DNA
cagctactccagaggctgaggtgggaggattgcttgagcccaggaggtc

SEQ ID NO: 821 - DNA, 50 bp, synthetic construct; identical to SEQ ID NO: 818
  source 1..50: mol_type = other DNA

SEQ ID NO: 822 - DNA, 26 bp, synthetic construct
  source 1..26: mol_type = other DNA
tgacagagtgagaccctgtctcaaaa

SEQ ID NO: 823 - DNA, 50 bp, synthetic construct
  source 1..50: mol_type = other DNA
tagcattacattgcctctctcaagaggatcttgagcgttagatagaccac

SEQ ID NO: 824 - DNA, 50 bp, synthetic construct
  source 1..50: mol_type = other DNA
ttttcacccttggctctgtccattactggctctgtggccgcgggcaagtt

SEQ ID NO: 825 - DNA, 50 bp, synthetic construct
  source 1..50: mol_type = other DNA
atctaaactctgaacctgaatttccccacctataaaaactttttcatggg

SEQ ID NO: 826 - DNA, 50 bp, synthetic construct
  source 1..50: mol_type = other DNA
gggcaagttacttatttgaacttcaatttctttatttgtaaaattgtgtt

SEQ ID NO: 827 - DNA, 50 bp, synthetic construct
  source 1..50: mol_type = other DNA
tagctgtatgatttgggcaagtcatctaacctttttaagataaatttcct

SEQ ID NO: 828 - DNA, 50 bp, synthetic construct
  source 1..50: mol_type = other DNA
gtatgatttgggcaagttcctaaacttctctgtgcttcgtttctcccctt

SEQ ID NO: 829 - DNA, 50 bp, synthetic construct
  source 1..50: mol_type = other DNA
ttacaagaattagaaaaagtcccctaactcctaaggtcccagccctgccc

SEQ ID NO: 830 - DNA, 50 bp, synthetic construct
  source 1..50: mol_type = other DNA
aaacctaatctccaatgtgatagtattggaaggttgggccttgggagatg

SEQ ID NO: 831 - DNA, 50 bp, synthetic construct
  source 1..50: mol_type = other DNA
attaggtcataagggtggagccctcatgagtgggattagtgcccttgtaa

SEQ ID NO: 832 - DNA, 50 bp, synthetic construct
  source 1..50: mol_type = other DNA
aagagaccccagagagctagctacaagctagtccctttccaccatgtgag

SEQ ID NO: 833 - DNA, 50 bp, synthetic construct
  source 1..50: mol_type = other DNA
gacacagtgagaaagcaccatctatgaaaaacaagtccttaccagatact

SEQ ID NO: 834 - DNA, 50 bp, synthetic construct
  source 1..50: mol_type = other DNA
ggatctgccagtgcttcaatttttgatttctcaccccccagaactgtgag

SEQ ID NO: 835 - DNA, 50 bp, synthetic construct
  source 1..50: mol_type = other DNA
aaataaatttctgtttataagttaccagtctatgatattttgttatagca

SEQ ID NO: 836 - DNA, 50 bp, synthetic construct
  source 1..50: mol_type = other DNA
tcatgaatggattagtgcccttaggaaagagaccccagggatcttgcttt

SEQ ID NO: 837 - DNA, 50 bp, synthetic construct
  source 1..50: mol_type = other DNA
ctcttcctgccatgtgaggacacagcaagaaggcactatctaaaaagcag

SEQ ID NO: 838 - DNA, 50 bp, synthetic construct
  source 1..50: mol_type = other DNA
agagcaagcccttaccagacaccaaatctactagtgccttgatcttggac

SEQ ID NO: 839 - DNA, 50 bp, synthetic construct
  source 1..50: mol_type = other DNA
ttcccagcctctagaactgtgagcaatacatttctattgtttataaatta

SEQ ID NO: 840 - DNA, 50 bp, synthetic construct
  source 1..50: mol_type = other DNA
cacagtctatggtagtttgttatacagcatgaataggctaagacaagggg

SEQ ID NO: 841 - DNA, 50 bp, synthetic construct
  source 1..50: mol_type = other DNA
tccccccaaaattcatatgttgaaatcctaaggcccaaggtgatcatggg

SEQ ID NO: 842 - DNA, 50 bp, synthetic construct
  source 1..50: mol_type = other DNA
ggcagaaccctcatgaatgggattagtgctcttataaaagaggccctaga

SEQ ID NO: 843 - DNA, 50 bp, synthetic construct
  source 1..50: mol_type = other DNA
gagaaccctcacactttccaccatgtgaggacacagccagaagttagtag

SEQ ID NO: 844 - DNA, 50 bp, synthetic construct
  source 1..50: mol_type = other DNA
tctgtaacccacaagagagtccttatcagaacctgatcatgctggcacct

SEQ ID NO: 845 - DNA, 50 bp, synthetic construct
  source 1..50: mol_type = other DNA
tgatcttggactttcagcctccagaactgtgagaaataaatttctgttgt

SEQ ID NO: 846 - DNA, 50 bp, synthetic construct
  source 1..50: mol_type = other DNA
tcgtaaggcattcagtttatgatattttgttatagcagtctgaatggaca

SEQ ID NO: 847 - DNA, 50 bp, synthetic construct
  source 1..50: mol_type = other DNA
aaaaattacatgatcatatcaattaatgcattaattaaattcaaatggaa

SEQ ID NO: 848 - DNA, 50 bp, synthetic construct
  source 1..50: mol_type = other DNA
ttaatgcaggaaaaaactaattcaaaatccattcacgataaaaaatatct

SEQ ID NO: 849 - DNA, 50 bp, synthetic construct
  source 1..50: mol_type = other DNA
cagtaaaatagaaatacaagagaactccctcaactcaaatcatctacata

SEQ ID NO: 850 - DNA, 50 bp, synthetic construct
  source 1..50: mol_type = other DNA
caaatctacatacaaatcatctacatacaactcaaatcatctacatacaa

SEQ ID NO: 851 - DNA, 50 bp, synthetic construct
  source 1..50: mol_type = other DNA
tatacagctaacattatacttattagtgacagacttaatattttccccct

SEQ ID NO: 852 - DNA, 50 bp, synthetic construct
  source 1..50: mol_type = other DNA
gagactgagaacaagacaatgatgttcactctcatcacttttattcaaca

SEQ ID NO: 853 - DNA, 50 bp, synthetic construct
  source 1..50: mol_type = other DNA
tagccttaaaagtttcagtgagtgcaataaggcaagaaaataaaataata

SEQ ID NO: 854 - DNA, 50 bp, synthetic construct
  source 1..50: mol_type = other DNA
ggcatacatattagaaaggaagaaataataccgtttctatttgcaggtga

SEQ ID NO: 855 - DNA, 50 bp, synthetic construct
  source 1..50: mol_type = other DNA
catgattgtctttgtagaaaatccaaggaatctacaatatactcctagaa

SEQ ID NO: 856 - DNA, 50 bp, synthetic construct
  source 1..50: mol_type = other DNA
ctaatgagcaagtcaccaaaattgcagaatacaagataaacatacagaaa

SEQ ID NO: 857 - DNA, 50 bp, synthetic construct
  source 1..50: mol_type = other DNA
ccattcatgattttaaaaactctcagaaaaattgtagtgggagaacttga

SEQ ID NO: 858 - DNA, 50 bp, synthetic construct
  source 1..50: mol_type = other DNA
taaacttgtatctgtaaaacttgagaaagagcatctacaaaaatcctata

SEQ ID NO: 859 - DNA, 50 bp, synthetic construct
  source 1..50: mol_type = other DNA
gctaagattattcttaatggtgaaaaactgaataattttcttcctaagat

SEQ ID NO: 860 - DNA, 50 bp, synthetic construct
  source 1..50: mol_type = other DNA
caggaacaggacaagaatgtccactcttgccatttttattcaatataata

SEQ ID NO: 861 - DNA, 50 bp, synthetic construct
  source 1..50: mol_type = other DNA
ccaaagttctagccagtgcagtaaggcataaaaaagaaataaaagacata

SEQ ID NO: 862 - DNA, 50 bp, synthetic construct
  source 1..50: mol_type = other DNA
cagatcagaaagaaagaaaactgtcccagtttccagataacatgactgtt

SEQ ID NO: 863 - DNA, 50 bp, synthetic construct
  source 1..50: mol_type = other DNA
tacatggaagatcccaaggaatctatttaaacttctcccctccccccaaa

SEQ ID NO: 864 - DNA, 50 bp, synthetic construct
  source 1..50: mol_type = other DNA
aaaacatctagaactaatgagtgagttcagcaaggtcacagggtacaaca

SEQ ID NO: 865 - DNA, 50 bp, synthetic construct
  source 1..50: mol_type = other DNA
tattctggtgagggctcagaagagaactgtaaagaaagcctcagttttct

SEQ ID NO: 866 - DNA, 50 bp, synthetic construct
  source 1..50: mol_type = other DNA
cagagattacctaagtagtcataatcagaatgttcacagacatgtgtatg

SEQ ID NO: 867 - DNA, 50 bp, synthetic construct
  source 1..50: mol_type = other DNA
gtaaaggccattctgatgaggtctcagatggaaatgaggaacatgttatt

SEQ ID NO: 868 - DNA, 50 bp, synthetic construct
  source 1..50: mol_type = other DNA
agaaactggaggaaaggctatccttgtcataaagtggcaaagaacttggc

SEQ ID NO: 869 - DNA, 50 bp, synthetic construct
  source 1..50: mol_type = other DNA
tgaatcgtgtttgtttcctagtgttttgtggaaggaggaacttatgagtg

SEQ ID NO: 870 - DNA, 50 bp, synthetic construct
  source 1..50: mol_type = other DNA
atgacataagatatttagcagaagaaatctctaaacaaagtgttgagcat

SEQ ID NO: 871 - DNA, 50 bp, synthetic construct
  source 1..50: mol_type = other DNA
gtggcatggcttctcttgactgcttacagcaaaatacaagaagagagaaa

SEQ ID NO: 872 - DNA, 50 bp, synthetic construct
  source 1..50: mol_type = other DNA
tgaattaaagatagattttataatcaaaagtgaagcagaacttagattta

SEQ ID NO: 873 - DNA, 50 bp, synthetic construct
  source 1..50: mol_type = other DNA
gaaaattatcagcctggccatgttgtaaagaatgaaacagtgggtctgag

SEQ ID NO: 874 - DNA, 50 bp, synthetic construct
  source 1..50: mol_type = other DNA
aaagaacaccaagggtgtgcccaagcaacagtttgataaggagagtaaca

SEQ ID NO: 875 - DNA, 50 bp, synthetic construct
  source 1..50: mol_type = other DNA
tggattagtggaagcctatttgtcaaggggacaatggaggaatgaccctg

SEQ ID NO: 876 - DNA, 50 bp, synthetic construct
  source 1..50: mol_type = other DNA
aaggcattttggagatcatcagggctgcctttcttcttataacaggccta

SEQ ID NO: 877 - DNA, 50 bp, synthetic construct
  source 1..50: mol_type = other DNA
gagtgccaaggcctggagggcagaactgtgtcagaagaggggccttgggt

SEQ ID NO: 878 - DNA, 50 bp, synthetic construct
  source 1..50: mol_type = other DNA
gcctaagggacctcatccctcactgccctgtgccaacccagacctctgct

SEQ ID NO: 879 - DNA, 50 bp, synthetic construct
  source 1..50: mol_type = other DNA
ccctgaggctggtatagcactcctcagctgtccaagatgaagctccagtg

SEQ ID NO: 880 - DNA, 50 bp, synthetic construct
  source 1..50: mol_type = other DNA
ggcccaggtgtgatgtatgccatagtggctgtctctccagaggtcacagg

SEQ ID NO: 881 - DNA, 50 bp, synthetic construct
  source 1..50: mol_type = other DNA
tggtaaaccttggtagcatctgtgaggtgccatctccaccaggaagcaca

SEQ ID NO: 882 - DNA, 50 bp, synthetic construct
  source 1..50: mol_type = other DNA
gtacacaggctctggaggcatggtttcctccacctggatttcaaaggatg

SEQ ID NO: 883 - DNA, 50 bp, synthetic construct
  source 1..50: mol_type = other DNA
ccccaaagagcctcagagccaccacagagagcccccactagggcactggc

SEQ ID NO: 884 - DNA, 50 bp, synthetic construct
  source 1..50: mol_type = other DNA
gccgggcgcggtggctcacgcctgtaatcccagcactttgggaggccaag

SEQ ID NO: 885 - DNA, 50 bp, synthetic construct
  source 1..50: mol_type = other DNA
gcgggtggatcacctgaggtcaggagttcgagaccggcctgatgaacatg

SEQ ID NO: 886 - DNA, 50 bp, synthetic construct
  source 1..50: mol_type = other DNA
gtgaaaccccatctctactaaaaatacacaaattagccgggcgtggtggc

SEQ ID NO: 887 - DNA, 50 bp, synthetic construct
  source 1..50: mol_type = other DNA
gtgcgcctgtaatcccagctactccagaggctgaggcaggagaattgctt

SEQ ID NO: 888 - DNA, 50 bp, synthetic construct
  source 1..50: mol_type = other DNA
gaacccgggaggtggagcttgcagtgagctgagatcgcgccactgcactc

SEQ ID NO: 889 - DNA, 17 bp, synthetic construct
  source 1..17: mol_type = other DNA
cagcctggatgacagag

SEQ ID NO: 890 - DNA, 50 bp, synthetic construct
  source 1..50: mol_type = other DNA
gccgggtgcggtggcttacatctgtaatctcagcactttgggaggccaag

SEQ ID NO: 891 - DNA, 50 bp, synthetic construct
  source 1..50: mol_type = other DNA
gcgggtggatcacctgaggtcaggagttcgagaccagcctgaccaatatg

SEQ ID NO: 892 - DNA, 50 bp, synthetic construct
  source 1..50: mol_type = other DNA
gtgaaaccccgtctctactaaaaatacaaaaattagccgggcgtggtggc

SEQ ID NO: 893 - DNA, 50 bp, synthetic construct
  source 1..50: mol_type = other DNA
acgcacctgtagtcccagctactcgggaggctgagacaggagaattgctt

SEQ ID NO: 894 - DNA, 50 bp, synthetic construct
  source 1..50: mol_type = other DNA
gaacccgggaggcggaggttgcagtgagccgagatcgcaccattgcactc

SEQ ID NO: 895 - DNA, 20 bp, synthetic construct
  source 1..20: mol_type = other DNA
cagcctggatgacagagcga

SEQ ID NO: 896 - DNA, 50 bp, synthetic construct
  source 1..50: mol_type = other DNA
caaaagatatgttaaagtcctaacccccagtactggtaaatgtgacttta

SEQ ID NO: 897 - DNA, 50 bp, synthetic construct
  source 1..50: mol_type = other DNA
tttgcaaataggatctttacagatataatcaagttaagatcatactggat

SEQ ID NO: 898 - DNA, 50 bp, synthetic construct
  source 1..50: mol_type = other DNA
aaggataggacctaaattcaatgactggtgtccttataaggagaaagaga

SEQ ID NO: 899 - DNA, 50 bp, synthetic construct
  source 1..50: mol_type = other DNA
tttgaagacacagagggagaaaggccatggaaaagtgagaggcagaattt

SEQ ID NO: 900 - DNA, 50 bp, synthetic construct
  source 1..50: mol_type = other DNA
ggagttatgctgccacaagccaagaaacaccaaagattgtgaacaaccac

SEQ ID NO: 901 - DNA, 50 bp, synthetic construct
  source 1..50: mol_type = other DNA
cagaagcgagaaggggtaagaaaggattcttccctagagccttcagaggg

SEQ ID NO: 902 - DNA, 50 bp, synthetic construct
  source 1..50: mol_type = other DNA
aggctacctctgccaacaccttaattctgaatttctagactccagaactg

SEQ ID NO: 903 - DNA, 50 bp, synthetic construct
  source 1..50: mol_type = other DNA
ggtacctgtgaatgtgaccttatttggaaaaaaggagttttgcaaatgta

SEQ ID NO: 904 - DNA, 50 bp, synthetic construct
  source 1..50: mol_type = other DNA
accaagttaagatgaagttataccagattaacatgagctctaaatcaaat

SEQ ID NO: 905 - DNA, 50 bp, synthetic construct
  source 1..50: mol_type = other DNA
gactggtgtgctaataaggagacagagattcggagacacacagacacaca

SEQ ID NO: 906 - DNA, 50 bp, synthetic construct
  source 1..50: mol_type = other DNA
tacagagaagaaggccaggttacaacagaagtggagattggagtaatgca

SEQ ID NO: 907 - DNA, 50 bp, synthetic construct
  source 1..50: mol_type = other DNA
gccacaagctaacaaacaccaaggattgatggcaaccaccaaaagcaaag

SEQ ID NO: 908 - DNA, 50 bp, synthetic construct
  source 1..50: mol_type = other DNA
aagaggcaaggaaagattctttcctggagccttcagagggagcatggccc

SEQ ID NO: 909 - DNA, 50 bp, synthetic construct
  source 1..50: mol_type = other DNA
tcctcctaaacctcgtgttgaaatttgatccccaatgttggaggtggagc

SEQ ID NO: 910 - DNA, 50 bp, synthetic construct
  source 1..50: mol_type = other DNA
ctaatgggaggtgttgggtcatgggggtggatccctcataaataaattaa

SEQ ID NO: 911 - DNA, 50 bp, synthetic construct
  source 1..50: mol_type = other DNA
tccctccttggatgggggagtgtgtgagtgagttctctattagttcccga

SEQ ID NO: 912 - DNA, 50 bp, synthetic construct
  source 1..50: mol_type = other DNA
gacagctggttgttacaaagggcctggcaccctctcccctctctcttgct

SEQ ID NO: 913 - DNA, 50 bp, synthetic construct
  source 1..50: mol_type = other DNA
tcctctctcaccatgtgatctctacacactggctcccctttaccttccac

SEQ ID NO: 914 - DNA, 50 bp, synthetic construct
  source 1..50: mol_type = other DNA
catgagtggaagcagcctgaggccctcaccagaagcagatgccggcacca

SEQ ID NO: 915 - DNA, 50 bp, synthetic construct
  source 1..50: mol_type = other DNA
tgcttcttgtacagcctgcagaatcgtgagccaaataaatttcttttctt

SEQ ID NO: 916 - DNA, 50 bp, synthetic construct
  source 1..50: mol_type = other DNA
tgctatggtttggacatttgtcccctccaaatctcatgttgaaatgtgat

SEQ ID NO: 917 - DNA, 50 bp, synthetic construct
  source 1..50: mol_type = other DNA
ccccagtggtggaggtggggcctggtgggaggtgttttggtcatgggagt

SEQ ID NO: 918 - DNA, 50 bp, synthetic construct
  source 1..50: mol_type = other DNA
ggacccctcatgactggctttgtgaccttcccttggtgatgagtgagttc

SEQ ID NO: 919 - DNA, 50 bp, synthetic construct
  source 1..50: mol_type = other DNA
tcactctattagttcatgtgagagctcgttgtttaaagagcctggcacct

SEQ ID NO: 920 - DNA, 50 bp, synthetic construct
  source 1..50: mol_type = other DNA
cctcctcctgctgttgctccctctctcgccatgtgatatgcctgctcccc

SEQ ID NO: 921 - DNA, 50 bp, synthetic construct
  source 1..50: mol_type = other DNA
tttgcctctcacaatgagtggaagcttgctgaggcctcatcaggagcagg

SEQ ID NO: 922 - DNA, 50 bp, synthetic construct
  source 1..50: mol_type = other DNA
tgctggcactatacttcttgtacagcttgcagaaccatgaaccaaataaa

SEQ ID NO: 923 - DNA, 50 bp, synthetic construct
  source 1..50: mol_type = other DNA
cctcttttctttataaattacccagtcttgggtgttcctttatagcaatg

SEQ ID NO: 924 - DNA, 50 bp, synthetic construct
  source 1..50: mol_type = other DNA
ggttcaaatcctgactctcccttctcatggagcagttcccaggaccatca

SEQ ID NO: 925 - DNA, 50 bp, synthetic construct
  source 1..50: mol_type = other DNA
ttttcatctgtaaaatggggattataaaaaataatagtacctaccttaaa

SEQ ID NO: 926 - DNA, 50 bp, synthetic construct
  source 1..50: mol_type = other DNA
tttcaattgcatatttattagcagcattatggtataacagttaagagctt

SEQ ID NO: 927 - DNA, 50 bp, synthetic construct
  source 1..50: mol_type = other DNA
tgttatgggttgaactgtgtatctcccaccccctaccaaattcatatgtt

SEQ ID NO: 928 - DNA, 50 bp, synthetic construct
  source 1..50: mol_type = other DNA
gaaatcctaacccccgtacctcagaatgtggctatatttggagactgtgt

SEQ ID NO: 929 - DNA, 50 bp, synthetic construct
  source 1..50: mol_type = other DNA
cttgtcagaggtaattaagttaaaatgaggtcattaaagtgggccctaat

SEQ ID NO: 930 - DNA, 50 bp, synthetic construct
  source 1..50: mol_type = other DNA
tcagtatgactagtgtccctataagaagaggagatttggacccaaacttg

SEQ ID NO: 931 - DNA, 50 bp, synthetic construct
  source 1..50: mol_type = other DNA
cacagagggaagatcgtgtgaagacggagggagaagatggtcatctatag

SEQ ID NO: 932 - DNA, 50 bp, synthetic construct
  source 1..50: mol_type = other DNA
ccaaagagagaagtcacagaagaaaccaaccctgccaacaccttgacctt

SEQ ID NO: 933 - DNA, 50 bp, synthetic construct
  source 1..50: mol_type = other DNA
ggactttagaactatgagaaaataaatttctgttgtttaagccaaaggcc

SEQ ID NO: 934 - DNA, 50 bp, synthetic construct
  source 1..50: mol_type = other DNA
atgttgaagtcctaacctctagtacctcagcatgccactgtatttggaga

SEQ ID NO: 935 - DNA, 50 bp, synthetic construct
  source 1..50: mol_type = other DNA
tagggtctttgaagaggtaattaaggaaaaaggaggtcatcagggtgggt

SEQ ID NO: 936 - DNA, 50 bp, synthetic construct
  source 1..50: mol_type = other DNA
cctaatctaatatgactgctgtccttacaagaagaggagatgacacagaa

SEQ ID NO: 937 - DNA, 50 bp, synthetic construct
  source 1..50: mol_type = other DNA
acacatggagggaagaccatgaggatacggggagaaggcagccatctgca

SEQ ID NO: 938 - DNA, 50 bp, synthetic construct
  source 1..50: mol_type = other DNA
agccaagcagagaggcctcaggagaaaccacccctgctgacgccttgttc

SEQ ID NO: 939 - DNA, 50 bp, synthetic construct
  source 1..50: mol_type = other DNA
ttggacttccagcctctggaactgtgagtataaatttctgttgttgaagc

SEQ ID NO: 940 - DNA, 50 bp, synthetic construct
  source 1..50: mol_type = other DNA
tacctagcatgtgaaactttgttatggcagccctagcaaatgaacacaga

SEQ ID NO: 941 - DNA, 50 bp, synthetic construct
  source 1..50: mol_type = other DNA
ttttagcacagagagtcccaagtcccaggaaaatggagtcccaagtccct

SEQ ID NO: 942 - DNA, 50 bp, synthetic construct
  source 1..50: mol_type = other DNA
cagtaaatggagatggtggtcacctcatttctctctgggtatctgggcaa

SEQ ID NO: 943 - DNA, 50 bp, synthetic construct
  source 1..50: mol_type = other DNA
taaaaagtaataaattattgatacactcaacaacatgaatcccaaaataa

SEQ ID NO: 944 - DNA, 45 bp, synthetic construct
  source 1..45: mol_type = other DNA
aaaaaaatcctaaaatttatatggaacaaaaaaagagcctgcata

SEQ ID NO: 945 - DNA, 50 bp, synthetic construct
  source 1..50: mol_type = other DNA
gccaaagcaagactaagcaaaaagaaaaaatctggaggcatcacactacc

SEQ ID NO: 946 - DNA, 50 bp, synthetic construct
  source 1..50: mol_type = other DNA
caacttcaaactacactacaagcctatagttaccaaaacagcatggtact

SEQ ID NO: 947 - DNA, 50 bp, synthetic construct
  source 1..50: mol_type = other DNA
ggtataaaaacaggcacatagacaattggaacagaatagagaaaccagaa

SEQ ID NO: 948 - DNA, 50 bp, synthetic construct
  source 1..50: mol_type = other DNA
ataaagccaaatacttacagccaactgttctttgacaaagcaaacaaaaa

SEQ ID NO: 949 - DNA, 50 bp, synthetic construct
  source 1..50: mol_type = other DNA
gaaaggacaccctcttcaacaaatggtgctgggataattggcaagcccta

SEQ ID NO: 950 - DNA, 50 bp, synthetic construct
  source 1..50: mol_type = other DNA
tgtagaaaatgaaactggatcctcttctctcaccttatacaaaaatcaac

SEQ ID NO: 951 - DNA, 50 bp, synthetic construct
  source 1..50: mol_type = other DNA
tcaagatggatcaaagacttaaatcttttatggcctgaaaccataaaaaa

SEQ ID NO: 952 - DNA, 50 bp, synthetic construct
  source 1..50: mol_type = other DNA
aatctagaagataacattggaagaactcttctagacattggcttaggcaa

SEQ ID NO: 953 - DNA, 50 bp, synthetic construct
  source 1..50: mol_type = other DNA
agagttcatgaccaggaacccaaaagcaaatgcaacaaggataaatagat

SEQ ID NO: 954 - DNA, 50 bp, synthetic construct
  source 1..50: mol_type = other DNA
gggacttaattaaactaaaaagcttctgtacagcaaaagaaataatcagc

SEQ ID NO: 955 - DNA, 36 bp, synthetic construct
  source 1..36: mol_type = other DNA
agattaaacagacaacccacagagtgggagaaaatc

SEQ ID NO: 956 - DNA, 50 bp, synthetic construct
  source 1..50: mol_type = other DNA
cattatataatgttaaagggattagtctggcaggaaaataccgcaattct

SEQ ID NO: 957 - DNA, 50 bp, synthetic construct
  source 1..50: mol_type = other DNA
aaatatataagcacctaacactggagcacccaaatttataaaataatcac

SEQ ID NO: 958 - DNA, 50 bp, synthetic construct
  source 1..50: mol_type = other DNA
tactagacctaagaaatgagatagacagcaacacaatagtagtgggggac

SEQ ID NO: 959 - DNA, 50 bp, synthetic construct
  source 1..50: mol_type = other DNA
ttcagtactcccctgacagcactaaactggtcatcaagacagaaagtcaa

SEQ ID NO: 960 - DNA, 50 bp, synthetic construct
  source 1..50: mol_type = other DNA
caaactctagcctgcaacaaatgaacttaacagatatttatagaacattc

SEQ ID NO: 961 - DNA, 50 bp, synthetic construct
  source 1..50: mol_type = other DNA
tacccaacaactgcagagtatacattctactcatcagcacatggaacatt

SEQ ID NO: 962 - DNA, 50 bp, synthetic construct
  source 1..50: mol_type = other DNA
gtccaagatagaccatatgataggccacaaaacaagtctgagcaaattta

SEQ ID NO: 963 - DNA, 50 bp, synthetic construct
  source 1..50: mol_type = other DNA
agaacattgaaattacatcaagtactctctcagactacagtggaataaaa

SEQ ID NO: 964 - DNA, 50 bp, synthetic construct
  source 1..50: mol_type = other DNA
ttgcaaatcaactcctaaaggcatccccaaaccatacaaatacatgcaaa

SEQ ID NO: 965 - DNA, 50 bp, synthetic construct
  source 1..50: mol_type = other DNA
ttaaataacttgctcctgaatgatcattgagtcaacaaggaaatcaagat

SEQ ID NO: 966 - DNA, 50 bp, synthetic construct
  source 1..50: mol_type = other DNA
ggaaattaaaaaattatttaaactgagtgataatagtgacacagcctatc

SEQ ID NO: 967 - DNA, 50 bp, synthetic construct
  source 1..50: mol_type = other DNA
aaaaccactgagatacagcaaaaaatggtgctaaggggaaagttcatagc

SEQ ID NO: 968 - DNA, 50 bp, synthetic construct
  source 1..50: mol_type = other DNA
attaaatgcttacatcaaaaagtctgaaagagcacaaatagacaatctaa

SEQ ID NO: 969 - DNA, 50 bp, synthetic construct
  source 1..50: mol_type = other DNA
ggtcacacttcatggaactagagaaaaaagaacaaaccaaactgaaaccc

SEQ ID NO: 970 - DNA, 50 bp, synthetic construct
  source 1..50: mol_type = other DNA
ggcagaagaaaagaaataacgaggatcagagcagaactaaatgaaattga

SEQ ID NO: 971 - DNA, 50 bp, synthetic construct
  source 1..50: mol_type = other DNA
aacaaacaaaaacaatacagaaaataaataaaaagctgtttctttgaaaa

SEQ ID NO: 972 - DNA, 50 bp, synthetic construct
  source 1..50: mol_type = other DNA
tgtgaatgaaattgatataccattagtgagattaaccaagaaaagaagag

SEQ ID NO: 973 - DNA, 50 bp, synthetic construct
  source 1..50: mol_type = other DNA
agaacatccaaataatcgtaattagaaatgaaatgggagatactacagcc

SEQ ID NO: 974 - DNA, 50 bp, synthetic construct
  source 1..50: mol_type = other DNA
aataccataaaaatacaaaagattattcaaggctactatgaacaccttta

SEQ ID NO: 975 - DNA, 50 bp, synthetic construct
  source 1..50: mol_type = other DNA
cacacataaactagaaaacctaggggagatggataaattcctggaaatat

SEQ ID NO: 976 - DNA, 50 bp, synthetic construct
  source 1..50: mol_type = other DNA
acaaccctcctaggttaaaccaggaagatatagaacctctcaacagacca

SEQ ID NO: 977 - DNA, 50 bp, synthetic construct
  source 1..50: mol_type = other DNA
ataacaacctgcaagattgaaatggtaataaaaaaattgccaacaacaaa

SEQ ID NO: 978 - DNA, 50 bp, synthetic construct
  source 1..50: mol_type = other DNA
aaaagtccaggaccagatggattcacagctgaattctatcagacattcaa

SEQ ID NO: 979 - DNA, 50 bp, synthetic construct
  source 1..50: mol_type = other DNA
agaagaattggtaccaatcctactgaaaatcttccaaatgatagagaaag

SEQ ID NO: 980 - DNA, 50 bp, synthetic construct
  source 1..50: mol_type = other DNA
aaggaatactctctaaatcaatctacaaagccagtatcaccctaatgcca

SEQ ID NO: 981 - DNA, 50 bp, synthetic construct
  source 1..50: mol_type = other DNA
aagccagaggacataacaaaaaacgaaaactacagtcagtatccctgatg

SEQ ID NO: 982 - DNA, 50 bp, synthetic construct
  source 1..50: mol_type = other DNA
aacatagatgcaaaaatcctcaataaaatcctagtgaattgaatccaaca

SEQ ID NO: 983 - DNA, 50 bp, synthetic construct
  source 1..50: mol_type = other DNA
gtatatcaaaaagataatccaccatgatcaagtaggtttcacactaggga

SEQ ID NO: 984 - DNA, 50 bp, synthetic construct
  source 1..50: mol_type = other DNA
tgcagggatggtttaacataggcaagtcaataaatgtgatacaccactta

SEQ ID NO: 985 - DNA, 50 bp, synthetic construct
  source 1..50: mol_type = other DNA
aacagaattacaaccagaaatcacatgattgtctcaatagacacagaaaa

SEQ ID NO: 986 - DNA, 50 bp, synthetic construct
  source 1..50: mol_type = other DNA
accatttgacaaaatccaatctccctttgtgactaaaaacctcagcaaaa

SEQ ID NO: 987 - DNA, 50 bp, synthetic construct
  source 1..50: mol_type = other DNA
tctgcatagaagggtcataccttaaggtaataaaaaccatctatggcaag

SEQ ID NO: 988 - DNA, 50 bp, synthetic construct
  source 1..50: mol_type = other DNA
cccacagccaactttatactgaagagggaaaagtggaaagcattcccact

SEQ ID NO: 989 - DNA, 50 bp, synthetic construct
  source 1..50: mol_type = other DNA
aagaactggaacaaggatgcccactttcaccacttctattcaacatcgta

SEQ ID NO: 990 - DNA, 50 bp, synthetic construct
  source 1..50: mol_type = other DNA
ccaggaatcttagccagagcaatcagacaagacaaagaaattaagagcat

SEQ ID NO: 991 - DNA, 50 bp, synthetic construct
  source 1..50: mol_type = other DNA
ccaaaatggtaaagaagacatcaaattgttgctgtttgcagatgatatga

SEQ ID NO: 992 - DNA, 50 bp, synthetic construct
  source 1..50: mol_type = other DNA
tggtatacctagaaaccctaaagtttccaccaaaaagctcctagaactgg

SEQ ID NO: 993 - DNA, 50 bp, synthetic construct
  source 1..50: mol_type = other DNA
taaatgaattcagcaaagtttcaggatacaaaattaatgtaaaaaattag

SEQ ID NO: 994 - DNA, 50 bp, synthetic construct
  source 1..50: mol_type = other DNA
tagctctgctatacactaacagcaaccaagctgagaatcaaatcaagaac

SEQ ID NO: 995 - DNA, 50 bp, synthetic construct
  source 1..50: mol_type = other DNA
tcaacccctttcacaatatcagcaaaaaaataaaatacataggaatatac

SEQ ID NO: 996 - DNA, 50 bp, synthetic construct
  source 1..50: mol_type = other DNA
ctaaacaaggatgtgaaagacctctacaaggaaaactacaaaacactgct

SEQ ID NO: 997 - DNA, 50 bp, synthetic construct
  source 1..50: mol_type = other DNA
gaaagaaatcatagacaacacaaacaaatggaaacacatcccatgctcat

SEQ ID NO: 998 - DNA, 50 bp, synthetic construct
  source 1..50: mol_type = other DNA
ggatgggtgaattaatattgtgaaaatgaccatactgccaaaagcaatct

SEQ ID NO: 999 - DNA, 50 bp, synthetic construct
  source 1..50: mol_type = other DNA
acatattcaatgcaattcccttcaaaataccatcatcactcttcacataa

SEQ ID NO: 1000 - DNA, 50 bp, synthetic construct
  source 1..50: mol_type = other DNA
ctagacaaaacaatcctaaaattcatatggaacaaaaaaagagcctgcat

SEQ ID NO: 1001 - DNA, 50 bp, synthetic construct
  source 1..50: mol_type = other DNA
agacaaagcaagactaagccaaagaacaaatctgaaggcatcacattatc

SEQ ID NO: 1002 - DNA, 50 bp, synthetic construct
  source 1..50: mol_type = other DNA
taacatgaaactatattataaggcaatagtcaccaaaacagcatggtact

SEQ ID NO: 1003 - DNA, 50 bp, synthetic construct
  source 1..50: mol_type = other DNA
ggtataaaaataggtgcatagaccaatggaacagaatagagaacccagaa

SEQ ID NO: 1004 - DNA, 50 bp, synthetic construct
  source 1..50: mol_type = other DNA
ataaacccaaatacttacagcccactgatattcaccaaagcaaacaaaaa

SEQ ID NO: 1005 - DNA, 50 bp, synthetic construct
  source 1..50: mol_type = other DNA
caaagtggggaaaggacaccctattcaacaaatggtgctgagatcattgg

SEQ ID NO: 1006 - DNA, 50 bp, synthetic construct
  source 1..50: mol_type = other DNA
caagccacatgtagaggaatgaaactggatcttcatctcttatcctatgc

SEQ ID NO: 1007 - DNA, 50 bp, synthetic construct
  source 1..50: mol_type = other DNA
gacattatataataaaaggattagtccaacaggaaaatatcacaatccta

SEQ ID NO: 1008 - DNA, 50 bp, synthetic construct
  source 1..50: mol_type = other DNA
aatatatatgcacctaacactggagctcccaaatttatagaacaattatt

SEQ ID NO: 1009 - DNA, 50 bp, synthetic construct
  source 1..50: mol_type = other DNA
actacacctaagaaatgagatagacacaataatagtggggaacttcaata

SEQ ID NO: 1010 - DNA, 50 bp, synthetic construct
  source 1..50: mol_type = other DNA
ttccactgacagcactagacaggtcatcaagacaggaagtcaacaatgaa

SEQ ID NO: 1011 - DNA, 50 bp, synthetic construct
  source 1..50: mol_type = other DNA
aaaatggacttaaactatactttaaaacaaactgacttaacagatattta

SEQ ID NO: 1012 - DNA, 50 bp, synthetic construct
  source 1..50: mol_type = other DNA
tagaacattctacccaacaactgcagaatatacattttttcatcagcaca

SEQ ID NO: 1013 - DNA, 50 bp, synthetic construct
  source 1..50: mol_type = other DNA
tggaacatcctccaagatagaccatatgatagaccacaaaacacatctca

SEQ ID NO: 1014 - DNA, 50 bp, synthetic construct
  source 1..50: mol_type = other DNA
ataaatttaagagaattgaaattatatcaagtactctctcagaccacagt

SEQ ID NO: 1015 - DNA, 50 bp, synthetic construct
  source 1..50: mol_type = other DNA
ggaataatactggaaattaactccaaaaggaaccctcaaaactatacaaa

SEQ ID NO: 1016 - DNA, 50 bp, synthetic construct
  source 1..50: mol_type = other DNA
tacatgcaaatcaaataatctgttactgaatgatccttaggtcaacaatg

SEQ ID NO: 1017 - DNA, 50 bp, synthetic construct
  source 1..50: mol_type = other DNA
aaataaagatggaaattaaaaaattatttgaactgtgaatgataatagca

SEQ ID NO: 1018 - DNA, 50 bp, synthetic construct
  source 1..50: mol_type = other DNA
gcacaaccaatcaaaacctctggaatatagcaaaagcagtgctaagagaa

SEQ ID NO: 1019 - DNA, 50 bp, synthetic construct
  source 1..50: mol_type = other DNA
aagttcacagtaataaatgcctgcatcaaaaagtctgaaagaacacaaat

SEQ ID NO: 1020 - DNA, 50 bp, synthetic construct
  source 1..50: mol_type = other DNA
agacaatctaaggtcacatttcaaggaactagagaaagaagaacaaacca

SEQ ID NO: 1021 - DNA, 50 bp, synthetic construct
  source 1..50: mol_type = other DNA
aacccaaacccagcagaagaaaaataacaaagatcagagcagaactaaat

SEQ ID NO: 1022 - DNA, 50 bp, synthetic construct
  source 1..50: mol_type = other DNA
gaaattgaaacaaacaaaaatacaaacgataaatgaaacaaaaagctggt

SEQ ID NO: 1023 - DNA, 50 bp, synthetic construct
  source 1..50: mol_type = other DNA
tctttgaaaagataaacaaaatcgatacacattagtgagattaaccaaga

SEQ ID NO: 1024 - DNA, 50 bp, synthetic construct
  source 1..50: mol_type = other DNA
agaaagaagatccaaataagctcaattagaaatgaaatgggagatattac

SEQ ID NO: 1025 - DNA, 50 bp, synthetic construct
  source 1..50: mol_type = other DNA
aactgacaccacagaaatacaaaagacaattcaagactactatgaacacc

SEQ ID NO: 1026 - DNA, 50 bp, synthetic construct
  source 1..50: mol_type = other DNA
tttatgtgcataaactagaaaacctagaggagatggataaattcctggaa

SEQ ID NO: 1027 - DNA, 50 bp, synthetic construct
  source 1..50: mol_type = other DNA
atatacaaacttcctagattaaaccaggaagaaacaaaaactcttaaaaa

SEQ ID NO: 1028 - DNA, 50 bp, synthetic construct
  source 1..50: mol_type = other DNA
aaaataacaagtaatgagattgaaacagtaataaaaaacattgccaacaa

SEQ ID NO: 1029 - DNA, 50 bp, synthetic construct
  source 1..50: mol_type = other DNA
aaaaaggtgcaggaccagatggattcacagccgaattctatcagacattc

SEQ ID NO: 1030 - DNA, 50 bp, synthetic construct
  source 1..50: mol_type = other DNA
aaagaagaattagtaccaatcctactgaaactattgcaaaagataaagat

SEQ ID NO: 1031 - DNA, 50 bp, synthetic construct
  source 1..50: mol_type = other DNA
ggaatcctccctaaatcattctatgaaaacatcattaccctaataccaaa

SEQ ID NO: 1032 - DNA, 50 bp, synthetic construct
  source 1..50: mol_type = other DNA
accaggaaaggacataacaaaaaaagaaaactacagaccaatatccctga

SEQ ID NO: 1033 - DNA, 50 bp, synthetic construct
  source 1..50: mol_type = other DNA
tgaacatagatgcaaaaatcttctatagctaactgaattcaacacaatat

SEQ ID NO: 1034 - DNA, 50 bp, synthetic construct
  source 1..50: mol_type = other DNA
caaaaagataatcgaccatgatcaagtgggtttcataccagggatgcagg

SEQ ID NO: 1035 - DNA, 50 bp, synthetic construct
  source 1..50: mol_type = other DNA
gttggtttaacatacacaagtaaataaacgtaatgatataccacacaaac

SEQ ID NO: 1036 - DNA, 50 bp, synthetic construct
  source 1..50: mol_type = other DNA
agaaatgaaaacaaaaatcatatgatcatctcaacagatgcagaaaaagc

SEQ ID NO: 1037 - DNA, 50 bp, synthetic construct
  source 1..50: mol_type = other DNA
atttgacaaaatctaacattcctttatgattaaaacccttaggaaaatta

SEQ ID NO: 1038 - DNA, 50 bp, synthetic construct
  source 1..50: mol_type = other DNA
gcatagaagggatatatcttatggtaataaaagccatctatgacaaaccc

SEQ ID NO: 1039 - DNA, 50 bp, synthetic construct
  source 1..50: mol_type = other DNA
acaggcaacattatactgcatggggaaaggttgaaagcatttcctctgag

SEQ ID NO: 1040 - DNA, 50 bp, synthetic construct
  source 1..50: mol_type = other DNA
aactggaataagacaaggatacccactttcaccaattctattcaacataa

SEQ ID NO: 1041 - DNA, 50 bp, synthetic construct
  source 1..50: mol_type = other DNA
tactggaagccctggccagagcaatcagacaagagaaagaaataaagggc

SEQ ID NO: 1042 - DNA, 50 bp, synthetic construct
  source 1..50: mol_type = other DNA
atccaaattggtaacgaggaagtcaaactgttgctctttggcaatgatat

SEQ ID NO: 1043 - DNA, 50 bp, synthetic construct
  source 1..50: mol_type = other DNA
gatcacatacctagaaaacccaaagattcatccaaaaaggtcctagatct

SEQ ID NO: 1044 - DNA, 50 bp, synthetic construct
  source 1..50: mol_type = other DNA
aataaatgaattctgtaaagtttcagatacaaaatcaatgtacataaatc

SEQ ID NO: 1045 - DNA, 50 bp, synthetic construct
  source 1..50: mol_type = other DNA
agtagcactgctatacaccaatagcaatcaagctgagaatcaaatcaaga

SEQ ID NO: 1046 - DNA, 50 bp, synthetic construct
  source 1..50: mol_type = other DNA
actcaaccccttttacaacagctgcaataaaataaaatgcttaggaatat

SEQ ID NO: 1047 - DNA, 50 bp, synthetic construct
  source 1..50: mol_type = other DNA
acctaaccaaagaggtgaaagagctctacaaggaaaacgttgaaatactg

SEQ ID NO: 1048 - DNA, 50 bp, synthetic construct
  source 1..50: mol_type = other DNA
ctgaaggaaatcatagatgacacaaacaaatggaaacacatcccatgttc

SEQ ID NO: 1049 - DNA, 50 bp, synthetic construct
  source 1..50: mol_type = other DNA
atgaatgggtagaatcaatattgtaaaaatgaccatactgccaaaagcaa

SEQ ID NO: 1050 - DNA, 50 bp, synthetic construct
  source 1..50: mol_type = other DNA
tctataaattcaatgcaattcccatcaaaataccaccaacactcttcaca

SEQ ID NO: 1051 - DNA, 50 bp, synthetic construct
  source 1..50: mol_type = other DNA
gaactagaaaaaacaatcctaaaattcatatgtaagaaaaaaaaagccca

SEQ ID NO: 1052 - DNA, 50 bp, synthetic construct
  source 1..50: mol_type = other DNA
catagccaaagcaagactaggcaaaaagaacaaatctggaggcatcacat

SEQ ID NO: 1053 - DNA, 50 bp, synthetic construct
  source 1..50: mol_type = other DNA
tacccagcttcaaactatactacaaggttataattaccaaaacagcacag

SEQ ID NO: 1054 - DNA, 50 bp, synthetic construct
  source 1..50: mol_type = other DNA
tactagtataaaaacaggcacgtagtacaatggaaaggaatagagaaccc

SEQ ID NO: 1055 - DNA, 50 bp, synthetic construct
  source 1..50: mol_type = other DNA
agaaataaagcttaatacttacagccaactgatcttcaagaaagcaaaca

SEQ ID NO: 1056 - DNA, 50 bp, synthetic construct
  source 1..50: mol_type = other DNA
aaatcataaagtgaggaaaggacaccctattcaacaaatgatgctgggat

SEQ ID NO: 1057 - DNA, 50 bp, synthetic construct
  source 1..50: mol_type = other DNA
aattggcaagccacatatagaataacgaaactggatcctcatctctcacc

SEQ ID NO: 1058 - DNA, 50 bp, synthetic construct
  source 1..50: mol_type = other DNA
ttatacaaaaatcaactcaagattgatcaaagacttaaatctgagacctc

SEQ ID NO: 1059 - DNA, 50 bp, synthetic construct
  source 1..50: mol_type = other DNA
aaacctaaaaattctaggagataacatcagaaaaattctcctagatactg

SEQ ID NO: 1060 - DNA, 50 bp, synthetic construct
  source 1..50: mol_type = other DNA
gcctaggcaaagaattcatgagcaagtgcccaaaagcaaatgcaatgaaa

SEQ ID NO: 1061 - DNA, 50 bp, synthetic construct
  source 1..50: mol_type = other DNA
accaagacaaatagatgggacttaattaaactaaaaagtgcctgcacagc

SEQ ID NO: 1062 - DNA, 50 bp, synthetic construct
  source 1..50: mol_type = other DNA
aaaaacaataatcagcagagtaaacagacaactcacagtatggaagaaaa

SEQ ID NO: 1063 - DNA, 50 bp, synthetic construct
  source 1..50: mol_type = other DNA
cattcaggacataggcatgggcaaggacttcgtgactaaaacaccaaaag

SEQ ID NO: 1064 - DNA, 50 bp, synthetic construct
  source 1..50: mol_type = other DNA
caatggcaacaaaagccaaaatagacaaatgggatctaattaagctaaag

SEQ ID NO: 1065 - DNA, 50 bp, synthetic construct
  source 1..50: mol_type = other DNA
agcttctgcacagcaaaagaaactaccatcagagtgaacaggcaacctac

SEQ ID NO: 1066 - DNA, 50 bp, synthetic construct
  source 1..50: mol_type = other DNA
aaaatgggagaaaatttttgcaatctacccatctgacaaagggctaatat

SEQ ID NO: 1067 - DNA, 50 bp, synthetic construct
  source 1..50: mol_type = other DNA
ccagaatctacaaagagctcaaacaaatttacaagaaaaaacaaccccat

SEQ ID NO: 1068 - DNA, 50 bp, synthetic construct
  source 1..50: mol_type = other DNA
caaaaagtgggcaaaggatataaacagacacttctcaaaagaagacatct

SEQ ID NO: 1069 - DNA, 50 bp, synthetic construct
  source 1..50: mol_type = other DNA
atgcaaccaacagacacatgaaaaaatgctcatcatcactggccatcaga

SEQ ID NO: 1070 - DNA, 50 bp, synthetic construct
  source 1..50: mol_type = other DNA
gaaatgcaaatcaaaaccacaatgagataccatctcacaccagttagaat

SEQ ID NO: 1071 - DNA, 50 bp, synthetic construct
  source 1..50: mol_type = other DNA
ggcagtcattagaaagtcaggaaacaacagatgctagagaggatgtggag

SEQ ID NO: 1072 - DNA, 50 bp, synthetic construct
  source 1..50: mol_type = other DNA
aaataggaacgcttttacactgttggtgggagagaaaattagttcaacca

SEQ ID NO: 1073 - DNA, 50 bp, synthetic construct
  source 1..50: mol_type = other DNA
ttgtggaagacagtgtggcgattcctcaaggatctagaactagaattacc

SEQ ID NO: 1074 - DNA, 50 bp, synthetic construct
  source 1..50: mol_type = other DNA
atttgacccagcaatcccattactgggtatatacccaaaggattataaat

SEQ ID NO: 1075 - DNA, 50 bp, synthetic construct
  source 1..50: mol_type = other DNA
catgctactataaagacacatgcacatgtatgtttattgtggcactattc

SEQ ID NO: 1076 - DNA, 50 bp, synthetic construct
  source 1..50: mol_type = other DNA
acaatagcaaagacttggaaccaacccaaatgtccatcaatgatagactg

SEQ ID NO: 1077 - DNA, 50 bp, synthetic construct
  source 1..50: mol_type = other DNA
gattaagcaaatgtggcacatatacaccatggaatactatgcagccataa

SEQ ID NO: 1078 - DNA, 50 bp, synthetic construct
  source 1..50: mol_type = other DNA
aaaaggatgagttcatgtcctttgcagggacatggattaagctggaaacc

SEQ ID NO: 1079 - DNA, 50 bp, synthetic construct
  source 1..50: mol_type = other DNA
atcattctcagcaaactagtcacaaggacagaaaaccaaacactgtatgt

SEQ ID NO: 1080 - DNA, 50 bp, synthetic construct
  source 1..50: mol_type = other DNA
tctcactcataggcaggacctgaccaatgagatcacttggacacagggag

SEQ ID NO: 1081 - DNA, 50 bp, synthetic construct
  source 1..50: mol_type = other DNA
ggaacatcacacactggggcctatcggggtgcggggctgggggagggata

SEQ ID NO: 1082 - DNA, 50 bp, synthetic construct
  source 1..50: mol_type = other DNA
gcattaggagaaatacctaatgtaaatgatgagttgatgggtgcagcaaa

SEQ ID NO: 1083 - DNA, 50 bp, synthetic construct
  source 1..50: mol_type = other DNA
ccaacaagtcacatgtatacctatgtatcaaacctgcatgttgtgcacat

SEQ ID NO: 1084 - DNA, 36 bp, synthetic construct
  source 1..36: mol_type = other DNA
gtaccctagaacttaaagtataataattaaaaaaaa

SEQ ID NO: 1085 - DNA, 50 bp, synthetic construct
  source 1..50: mol_type = other DNA
ataccattcaggccacaggcataggcaaggacttcatgactaaaacaaca

SEQ ID NO: 1086 - DNA, 50 bp, synthetic construct
  source 1..50: mol_type = other DNA
aaagcaatggcaatgaaagccataatagacaaatgggatctaattaaact

SEQ ID NO: 1087 - DNA, 50 bp, synthetic construct
  source 1..50: mol_type = other DNA
aaagagcttctgcatggcaaaagaaagtaccatcagagtgaacaggcaac

SEQ ID NO: 1088 - DNA, 50 bp, synthetic construct
  source 1..50: mol_type = other DNA
ctacagaatgggagaaaatttttgcaatctaccctctgacaaagggctaa

SEQ ID NO: 1089 - DNA, 50 bp, synthetic construct
  source 1..50: mol_type = other DNA
tatccagaatctacaaagaactcaaacaaatttacaagaaaaaaacaaac

SEQ ID NO: 1090 - DNA, 50 bp, synthetic construct
  source 1..50: mol_type = other DNA
aaccccatcaaaaagtgggcaaaggatatgaacagacacttctcaaaaga

SEQ ID NO: 1091 - DNA, 50 bp, synthetic construct
  source 1..50: mol_type = other DNA
agacatttatgcagccaacagacacatgaaaaaatgctcatcatcactgg

SEQ ID NO: 1092 - DNA, 50 bp, synthetic construct
  source 1..50: mol_type = other DNA
ccatcagagaaatgcaaatcaaaaccacaatgagataccatctcatgcca

SEQ ID NO: 1093 - DNA, 50 bp, synthetic construct
  source 1..50: mol_type = other DNA
gttagaatggcaatcattaaaaagtcaggaaacaacagatgctggagagg

SEQ ID NO: 1094 - DNA, 50 bp, synthetic construct
  source 1..50: mol_type = other DNA
atgtggagaaataggaacgcttttacactgttcctgggagtgtaaactgg

SEQ ID NO: 1095 - DNA, 50 bp, synthetic construct
  source 1..50: mol_type = other DNA
ttcaaccattgtggaagacagtgtggcgattcctcaaggatctagaacta

SEQ ID NO: 1096 - DNA, 50 bp, synthetic construct
  source 1..50: mol_type = other DNA
gaattaccatttgacccagcaatcccattactgggtatatatccaaagga

SEQ ID NO: 1097 - DNA, 50 bp, synthetic construct
  source 1..50: mol_type = other DNA
ttataaatcatgctactataaagacacatgcacacgtatgtttactgagg

SEQ ID NO: 1098 - DNA, 50 bp, synthetic construct
  source 1..50: mol_type = other DNA
cactattcacaatagcaaagacttggaaccaacccaaatatccaccaatg

SEQ ID NO: 1099 - DNA, 50 bp, synthetic construct
  source 1..50: mol_type = other DNA
atagactagattaagaaaatgtggcacatatacaccacggaatactatgc

SEQ ID NO: 1100 - DNA, 50 bp, synthetic construct
  source 1..50: mol_type = other DNA
agccataaaaaacgatgagttcatgccctttgcagggacatggatgaagc

SEQ ID NO: 1101 - DNA, 50 bp, synthetic construct
  source 1..50: mol_type = other DNA
tggaaaccatcattctcagcaaactatcacaagacagaaaaccaaacacc

SEQ ID NO: 1102 - DNA, 50 bp, synthetic construct
  source 1..50: mol_type = other DNA
gcatgttctcactcataggtgggaactgaacaatgagatcacctggacac

SEQ ID NO: 1103 - DNA, 50 bp, synthetic construct
  source 1..50: mol_type = other DNA
agggcagggaacatcacacactgggacctgttgcgggtggtgggttgggg

SEQ ID NO: 1104 - DNA, 50 bp, synthetic construct
  source 1..50: mol_type = other DNA
gagggatagcattaggagaaatacctaatgtaaatgatgagttgatgggt

SEQ ID NO: 1105 - DNA, 50 bp, synthetic construct
  source 1..50: mol_type = other DNA
gcagcaaaccaacatggcacatgtatacctatgtatcagatctgcacgtt

SEQ ID NO: 1106 - DNA, 44 bp, synthetic construct
  source 1..44: mol_type = other DNA
gtgcacatgtaccctagaacttaaagtataattaaaaaaaaaaa

SEQ ID NO: 1107 - DNA, 50 bp, synthetic construct
  source 1..50: mol_type = other DNA
agaggtgacagcatgctggcagtcctcagagcccttgcttgctctcggca

SEQ ID NO: 1108 - DNA, 50 bp, synthetic construct
  source 1..50: mol_type = other DNA
cctcccctggctgcgctcccactttggtggcatttgaggagcccttcagc

SEQ ID NO: 1109 - DNA, 50 bp, synthetic construct
  source 1..50: mol_type = other DNA
cccccccccactgcactgtgggagcccttttctgggctggccaaggctgg

SEQ ID NO: 1110 - DNA, 50 bp, synthetic construct
  source 1..50: mol_type = other DNA
agcccactctctcagcttgcagggaggtgtggagggagaggtgtgagtgg

SEQ ID NO: 1111 - DNA, 50 bp, synthetic construct
  source 1..50: mol_type = other DNA
gaactggggctgggtgcggcacttgcgggccagctggagttctgggtggg

SEQ ID NO: 1112 - DNA, 50 bp, synthetic construct
  source 1..50: mol_type = other DNA
catgggcttggcaggccccgcactcggagcagccagccagccctgctggc

SEQ ID NO: 1113 - DNA, 50 bp, synthetic construct
  source 1..50: mol_type = other DNA
cccgggcaatgagggacttagcacatgggccagtgtctgcggaggttgta

SEQ ID NO: 1114 - DNA, 50 bp, synthetic construct
  source 1..50: mol_type = other DNA
ctgggtcccccagcagtgccagcccaccggcgctgtgctcaatttctcac

SEQ ID NO: 1115 - DNA, 50 bp, synthetic construct
  source 1..50: mol_type = other DNA
tgagccttagctgccttcctgcggggcagggctcgggacctgcagcctgc

SEQ ID NO: 1116 - DNA, 50 bp, synthetic construct
  source 1..50: mol_type = other DNA
catgcctgagccttccacccacgccatgggctcctgtgtggcccaagcct

SEQ ID NO: 1117 - DNA, 50 bp, synthetic construct
  source 1..50: mol_type = other DNA
ccccaaggagcaccaccccctgctccatggcgcccagtcccattgaccac

SEQ ID NO: 1118 - DNA, 50 bp, synthetic construct
  source 1..50: mol_type = other DNA
ccaagggctgaggaatgcgagtgcacagtgcgggactggcaggcagctcc

SEQ ID NO: 1119 - DNA, 50 bp, synthetic construct
  source 1..50: mol_type = other DNA
acctgcagccctggtgcgggatccactaggtgaagccagctgggctcctg

SEQ ID NO: 1120 - DNA, 50 bp, synthetic construct
  source 1..50: mol_type = other DNA
agtctggtggggacgtggagagtctttatatctagctcagggattgtaaa

SEQ ID NO: 1121 - DNA, 50 bp, synthetic construct
  source 1..50: mol_type = other DNA
tacaccaatcagcaccctgtgtttagctcaaggtttgtgagtgcaccagt

SEQ ID NO: 1122 - DNA, 50 bp, synthetic construct
  source 1..50: mol_type = other DNA
cgacactctgtatctagctgctcgggtgaggacatggaaaacctttatgt

SEQ ID NO: 1123 - DNA, 50 bp, synthetic construct
  source 1..50: mol_type = other DNA
ctagctcagggattgtaaatacaccaatcggcactctgtatctagctcaa

SEQ ID NO: 1124 - DNA, 50 bp, synthetic construct
  source 1..50: mol_type = other DNA
ggtttgtaaatacaccaatcagcaccctgtgtttagctcaaggtttgtga

SEQ ID NO: 1125 - DNA, 50 bp, synthetic construct
  source 1..50: mol_type = other DNA
gtgcaccaatcgacactctgtatctagctgctctggtggggccttgaaga

SEQ ID NO: 1126 - DNA, 50 bp, synthetic construct
  source 1..50: mol_type = other DNA
acctttatgtctagctcaaggattgtaaatacaccaatcggcactctgta

SEQ ID NO: 1127 - DNA, 50 bp, synthetic construct
  source 1..50: mol_type = other DNA
tctagctcaaggtttgtaaacacaccaatcagcaccctgtgtttagctca

SEQ ID NO: 1128 - DNA, 50 bp, synthetic construct
  source 1..50: mol_type = other DNA
aggtttgtgaatgcaccaatcgacactctgtatctagctgctctggtggg

SEQ ID NO: 1129 - DNA, 50 bp, synthetic construct
  source 1..50: mol_type = other DNA
gccttggagaacctgtgtgtcgaaactctgtatctaactaatctgatggg

SEQ ID NO: 1130 - DNA, 50 bp, synthetic construct
  source 1..50: mol_type = other DNA
aacatggagaacctttgtatctagctctgggattgtaaatgcaccaatca

SEQ ID NO: 1131 - DNA, 50 bp, synthetic construct
  source 1..50: mol_type = other DNA
gcgccctgacaaaacaggccactcggctctaccaatcagcaggatgtggg

SEQ ID NO: 1132 - DNA, 50 bp, synthetic construct
  source 1..50: mol_type = other DNA
tggggccagataagagaataaaagcaggctgcccagagccagcagtggca

SEQ ID NO: 1133 - DNA, 50 bp, synthetic construct
  source 1..50: mol_type = other DNA
acccgctcgggtccccttccacactgtggaagctttgttctttcgctctt

SEQ ID NO: 1134 - DNA, 50 bp, synthetic construct
  source 1..50: mol_type = other DNA
tgcaataaatcttgctactgctcactctttgggtccacgctgcttttatg

SEQ ID NO: 1135 - DNA, 50 bp, synthetic construct
  source 1..50: mol_type = other DNA
agctgtaacactcaccgcgaagatcagcagcttcactcctgagcccagcg

SEQ ID NO: 1136 - DNA, 50 bp, synthetic construct
  source 1..50: mol_type = other DNA
agaacacaatcccaccgggaggaacgaacaactccagacacactgcctta

SEQ ID NO: 1137 - DNA, 50 bp, synthetic construct
  source 1..50: mol_type = other DNA
agagctgtaacactcaccgcgaaggtctgcagcttcactcctgagccagg

SEQ ID NO: 1138 - DNA, 50 bp, synthetic construct
  source 1..50: mol_type = other DNA
gagaccatgaacccaccagaaggaagaaactccgaacacatctgaacatc

SEQ ID NO: 1139 - DNA, 50 bp, synthetic construct
  source 1..50: mol_type = other DNA
agaagggacagactccagacgcgccaccttaagagctgtagcactcaccg

SEQ ID NO: 1140 - DNA, 50 bp, synthetic construct
  source 1..50: mol_type = other DNA
cgagggtccgcggcttcattcttgaagtcagtgagaccaataactcacca

SEQ ID NO: 1141 - DNA, 12 bp, synthetic construct
  source 1..12: mol_type = other DNA
attccggacaca

SEQ ID NO: 1142 - DNA, 50 bp, synthetic construct
  source 1..50: mol_type = other DNA
caaataggaacagctctggtctgcagctcccagcatgatcgacgcagaag

SEQ ID NO: 1143 - DNA, 50 bp, synthetic construct
  source 1..50: mol_type = other DNA
acggtgatttctacatttccaaatgaggtacctggttcatctcattggga

SEQ ID NO: 1144 - DNA, 50 bp, synthetic construct
  source 1..50: mol_type = other DNA
ctggttggacagtgggcacagcccatggagggtgagccaaagcagtgcgg

SEQ ID NO: 1145 - DNA, 50 bp, synthetic construct
  source 1..50: mol_type = other DNA
gtcatcaactcacctgggaagcgcatggggttgggggatttccctttcct

SEQ ID NO: 1146 - DNA, 50 bp, synthetic construct
  source 1..50: mol_type = other DNA
agccaagggaagccatgacagactacctggaaaaacaggacactcccacc

SEQ ID NO: 1147 - DNA, 50 bp, synthetic construct
  source 1..50: mol_type = other DNA
caaatactgtgcttttcccaaggtcttagcaactggcagacaaggtgatt

SEQ ID NO: 1148 - DNA, 50 bp, synthetic construct
  source 1..50: mol_type = other DNA
ctctcccatgcctggcttggtggctcccatgcccatggagccttgctcac

SEQ ID NO: 1149 - DNA, 50 bp, synthetic construct
  source 1..50: mol_type = other DNA
tgctagcgcagcagtccgagatcgatctgccagacagcagcctggctagg

SEQ ID NO: 1150 - DNA, 50 bp, synthetic construct
  source 1..50: mol_type = other DNA
ggaggggcagccaccattgctaaagcttgagtaggtaaacaaagcagctg

SEQ ID NO: 1151 - DNA, 50 bp, synthetic construct
  source 1..50: mol_type = other DNA
ggaagctcgaactgggcggagcccacagcagctcaacaaggcctactgcc

SEQ ID NO: 1152 - DNA, 50 bp, synthetic construct
  source 1..50: mol_type = other DNA
tctagactccacctctgtgggcagggcgtagctgaacaaaaggcagcaga

SEQ ID NO: 1153 - DNA, 50 bp, synthetic construct
  source 1..50: mol_type = other DNA
caactcctgcagacttaaatgtccctgtctgacagctctgaagagagcgg

SEQ ID NO: 1154 - DNA, 50 bp, synthetic construct
  source 1..50: mol_type = other DNA
tggttctcccagcatggcgtttgagctctgagaacagacagactgcctcc

SEQ ID NO: 1155 - DNA, 50 bp, synthetic construct
  source 1..50: mol_type = other DNA
tcaagtgggtccctgactcccgtgtagcctaactgggaggcacctcccag

SEQ ID NO: 1156 - DNA, 50 bp, synthetic construct
  source 1..50: mol_type = other DNA
taggggacaacagacatctcatataggtggctccccctctgggacgaagc

SEQ ID NO: 1157 - DNA, 50 bp, synthetic construct
  source 1..50: mol_type = other DNA
ttccagaggaaggatcaggcagcaatatttgctgttctgcagcctctgct

SEQ ID NO: 1158 - DNA, 50 bp, synthetic construct
  source 1..50: mol_type = other DNA
ggtgatacccaggcaaacagggtctggagtagaactctagcaaactccaa

SEQ ID NO: 1159 - DNA, 50 bp, synthetic construct
  source 1..50: mol_type = other DNA
cagacctgcagctgagggacctgactattagaaggaaaactaaaaaacag

SEQ ID NO: 1160 - DNA, 50 bp, synthetic construct
  source 1..50: mol_type = other DNA
aaaggaatagcataaacatcaacaaaaaggtcatctacaccaaaacccca

SEQ ID NO: 1161 - DNA, 50 bp, synthetic construct
  source 1..50: mol_type = other DNA
tctgtaggtcaccaacaccaaagaccaaaggtagataaaaccacaaagat

SEQ ID NO: 1162 - DNA, 50 bp, synthetic construct
  source 1..50: mol_type = other DNA
ggggagaaaccagagcagaaaagctgaaaattctaaaaatcagagcgcct

SEQ ID NO: 1163 - DNA, 50 bp, synthetic construct
  source 1..50: mol_type = other DNA
cttctcctccaaaggattgcagctcctcaccagcaacggaacaaagctgg

SEQ ID NO: 1164 - DNA, 50 bp, synthetic construct
  source 1..50: mol_type = other DNA
acagagaatgactttgacgagttaacagaagtaggcttcagaaggtcagt

SEQ ID NO: 1165 - DNA, 50 bp, synthetic construct
  source 1..50: mol_type = other DNA
aataaactctgagctaaaggaggatgttcgaatccaccacaaggaagcta

SEQ ID NO: 1166 - DNA, 50 bp, synthetic construct
  source 1..50: mol_type = other DNA
aaaaccttgaaaaaagattagatgaatggctaactagaataaacagcata

SEQ ID NO: 1167 - DNA, 50 bp, synthetic construct
  source 1..50: mol_type = other DNA
gagaagaccttaaatgacctgatggagctgaaaaccatggcacgagaact

SEQ ID NO: 1168 - DNA, 50 bp, synthetic construct
  source 1..50: mol_type = other DNA
tcgtgacgcgtgcacaaacttcaatagctgattcgatcaagtggaagaaa

SEQ ID NO: 1169 - DNA, 50 bp, synthetic construct
  source 1..50: mol_type = other DNA
gggtatcagtgattgaagatcaaattaatgaaataaagcaagaaaacaag

SEQ ID NO: 1170 - DNA, 50 bp, synthetic construct
  source 1..50: mol_type = other DNA
gttagagaaaaaagagtaaaaagaaatgaacaaagcctccaagaaatatg

SEQ ID NO: 1171 - DNA, 50 bp, synthetic construct
  source 1..50: mol_type = other DNA
ggactatgtgaatagaccaaatctacgtttgattggtgtacctgagagtg

SEQ ID NO: 1172 - DNA, 50 bp, synthetic construct
  source 1..50: mol_type = other DNA
atgcagagaatggaaccaagttggaaaacactcttcagtatattatccag

SEQ ID NO: 1173 - DNA, 50 bp, synthetic construct
  source 1..50: mol_type = other DNA
gagaacttctccaacatagcaaggcaggccaacattcaaattcaggaaac

SEQ ID NO: 1174 - DNA, 50 bp, synthetic construct
  source 1..50: mol_type = other DNA
acagagaacaccacaaagatactccttgagaagggcaaccccaagacaca

SEQ ID NO: 1175 - DNA, 50 bp, synthetic construct
  source 1..50: mol_type = other DNA
taattgtcagattcaccaaggttgaaatgaaggaaaaagtgttaagggca

SEQ ID NO: 1176 - DNA, 50 bp, synthetic construct
  source 1..50: mol_type = other DNA
gccagagagaaaggtcaggttacccacaaagggaagcccatcagactaac

SEQ ID NO: 1177 - DNA, 50 bp, synthetic construct
  source 1..50: mol_type = other DNA
agtggatctctcagcagaaaccctacaagccagaagagagtgggggccaa

SEQ ID NO: 1178 - DNA, 50 bp, synthetic construct
  source 1..50: mol_type = other DNA
tgttcaacattcttaaagaaaagaattttcaacccagaatttcatatcca

SEQ ID NO: 1179 - DNA, 50 bp, synthetic construct
  source 1..50: mol_type = other DNA
gccaaactagacttcataagtgaaggagaaataaaatcctttacggacaa

SEQ ID NO: 1180 - DNA, 50 bp, synthetic construct
  source 1..50: mol_type = other DNA
gtaaatgctgagagattttgtcaccaccaggcctgccttacaagagttcc

SEQ ID NO: 1181 - DNA, 50 bp, synthetic construct
  source 1..50: mol_type = other DNA
tgaaggaagcactaaacatggaaagaagtaactggtaccagccactgcaa

SEQ ID NO: 1182 - DNA, 50 bp, synthetic construct
  source 1..50: mol_type = other DNA
aaacatgccaaattataaagaccactaatgctaggaagaaactacatcaa

SEQ ID NO: 1183 - DNA, 50 bp, synthetic construct
  source 1..50: mol_type = other DNA
ttaatgggcaaaataaccagtgaacatcataatgacaggatcaaattcac

SEQ ID NO: 1184 - DNA, 50 bp, synthetic construct
  source 1..50: mol_type = other DNA
acataacaatattaaccttaaatgtaaatgggctaaatgccccaattaaa

SEQ ID NO: 1185 - DNA, 50 bp, synthetic construct
  source 1..50: mol_type = other DNA
agacacagactggcaaattggataaagagtcaagacccatcagtgtgctg

SEQ ID NO: 1186 - DNA, 50 bp, synthetic construct
  source 1..50: mol_type = other DNA
tattcaggagacccatatcacgtgtaaagacgcacataggctcaaaataa

SEQ ID NO: 1187 - DNA, 50 bp, synthetic construct
  source 1..50: mol_type = other DNA
agggatggaggaagatctaccaagcaaatggaaagcaaaaaaaaaaagca

SEQ ID NO: 1188 - DNA, 50 bp, synthetic construct
  source 1..50: mol_type = other DNA
ggggttgcaatcctggtttctgataaaacagactttaaaccaacaaagat

SEQ ID NO: 1189 - DNA, 50 bp, synthetic construct
  source 1..50: mol_type = other DNA
caaaagaagcccattacataatggtaaagggatcaatttaacaagaagag

SEQ ID NO: 1190 - DNA, 50 bp, synthetic construct
  source 1..50: mol_type = other DNA
ctaactatcctaaatttatatgcacccaatacaggagcacctagattcat

SEQ ID NO: 1191 - DNA, 50 bp, synthetic construct
  source 1..50: mol_type = other DNA
aaagcaagtccttagagacctacaaagagacttaggttcccacacaataa

SEQ ID NO: 1192 - DNA, 50 bp, synthetic construct
  source 1..50: mol_type = other DNA
taatgggagactgtaacaccccactgtcaatattaggcagatcaatgaga

SEQ ID NO: 1193 - DNA, 50 bp, synthetic construct
  source 1..50: mol_type = other DNA
cagaaggttaccaaggatatccaggacctgaactcagatctgcaacaagc

SEQ ID NO: 1194 - DNA, 50 bp, synthetic construct
  source 1..50: mol_type = other DNA
aggccaaatagacatcttcataactctccaccccaaatcaacagagtata

SEQ ID NO: 1195 - DNA, 50 bp, synthetic construct
  source 1..50: mol_type = other DNA
cattcttctcagcaccacatcgcacttattctaaaattgatcacataatt

SEQ ID NO: 1196 - DNA, 50 bp, synthetic construct
  source 1..50: mol_type = other DNA
ggaagtaaagcactccttagcaaatgtaaaagaacagaaatcacaacaaa

SEQ ID NO: 1197 - DNA, 50 bp, synthetic construct
  source 1..50: mol_type = other DNA
ctgtctctcagacgacagtgcaatcaaattagaactcaggattaagaaac

SEQ ID NO: 1198 - DNA, 50 bp, synthetic construct
  source 1..50: mol_type = other DNA
tcactcaaaactgcacaactacatggaaactgaacaacttgctcctgaat

SEQ ID NO: 1199 - DNA, 50 bp, synthetic construct
  source 1..50: mol_type = other DNA
gactactgggtagataacaaaatgaaggcagaaataaagatgttctttga

SEQ ID NO: 1200 - DNA, 50 bp, synthetic construct
  source 1..50: mol_type = other DNA
aaccaatgagaacaaagacacaaggtaccagaatctctgggacacattta

SEQ ID NO: 1201 - DNA, 50 bp, synthetic construct
  source 1..50: mol_type = other DNA
aagcaatgtgtagagggaaatttatagcactaaatgcccacaagagaaag

SEQ ID NO: 1202 - DNA, 50 bp, synthetic construct
  source 1..50: mol_type = other DNA
caggaaagatctaaaatcaacaccccaacatcacaattaaaagaactaga

SEQ ID NO: 1203 - DNA, 50 bp, synthetic construct
  source 1..50: mol_type = other DNA
gaagcacgagtaaacaaattcaaaagctagcagaagacaagaaataacta

SEQ ID NO: 1204 - DNA, 50 bp, synthetic construct
  source 1..50: mol_type = other DNA
agatcagagcagaactgaaagagatagagacacaaaaaacccgtcaaaaa

SEQ ID NO: 1205 - DNA, 50 bp, synthetic construct
  source 1..50: mol_type = other DNA
aatcagtgaatctaggagctggttttttgaaaagatcaacaaaatagata

SEQ ID NO: 1206 - DNA, 50 bp, synthetic construct
  source 1..50: mol_type = other DNA
gactgctagcaagactaataaagaagaaaagagagaagaatcaaatagat

SEQ ID NO: 1207 - DNA, 50 bp, synthetic construct
  source 1..50: mol_type = other DNA
gcaataaaaaagtgataaaggggatatcaccaccgatcccacagaaatac

SEQ ID NO: 1208 - DNA, 50 bp, synthetic construct
  source 1..50: mol_type = other DNA
aaactaccatcagagaatattataaacacctctacgcaaataaactagga

SEQ ID NO: 1209 - DNA, 50 bp, synthetic construct
  source 1..50: mol_type = other DNA
aatctagaagaaatggataaattcctggacacatataccctcccaagtct

SEQ ID NO: 1210 - DNA, 50 bp, synthetic construct
  source 1..50: mol_type = other DNA
aaaccaggaagaaattgaatctctgaatagactaataacaggctctgaaa

SEQ ID NO: 1211 - DNA, 50 bp, synthetic construct
  source 1..50: mol_type = other DNA
ttgaggcaataattaatagcctaccaaccaaaaaagtccaggaccagatg

SEQ ID NO: 1212 - DNA, 50 bp, synthetic construct
  source 1..50: mol_type = other DNA
gattcacagccaaattctgctagaggtacaaagatgagctggtaccattc

SEQ ID NO: 1213 - DNA, 50 bp, synthetic construct
  source 1..50: mol_type = other DNA
cttctgaaactattccaatcaatagaaaaagagggaatcctccctaactc

SEQ ID NO: 1214 - DNA, 50 bp, synthetic construct
  source 1..50: mol_type = other DNA
attttatgaggccaacatcatcctgataccaaagcctggcagagacacaa

SEQ ID NO: 1215 - DNA, 50 bp, synthetic construct
  source 1..50: mol_type = other DNA
caaaaaaagaaaattttagaccaatatccctgatgaacatcaatgcgaaa

SEQ ID NO: 1216 - DNA, 50 bp, synthetic construct
  source 1..50: mol_type = other DNA
atcctcaataaaatactggcaaaccaaatccagcagcacatcaaaaagct

SEQ ID NO: 1217 - DNA, 50 bp, synthetic construct
  source 1..50: mol_type = other DNA
tgtccaccacgattaagtcggcttcatcccggagatgtgaggctggttca

SEQ ID NO: 1218 - DNA, 50 bp, synthetic construct
  source 1..50: mol_type = other DNA
acatatgcaaatcaataaatgcaatccatcacataagcagaacccatgac

SEQ ID NO: 1219 - DNA, 50 bp, synthetic construct
  source 1..50: mol_type = other DNA
aaaaaccacatgattatctcaatagatgtagaaaaggcctttgacaaaat

SEQ ID NO: 1220 - DNA, 50 bp, synthetic construct
  source 1..50: mol_type = other DNA
tcaacagcccttcatgctaaaaactctcaataaactaggtaatgatggga

SEQ ID NO: 1221 - DNA, 50 bp, synthetic construct
  source 1..50: mol_type = other DNA
cgtatctcaaaataataagagctatttatgacaaacccacagccaatatc

SEQ ID NO: 1222 - DNA, 50 bp, synthetic construct
  source 1..50: mol_type = other DNA
atactgagtgggcaaaaactggaagcattccctttgaaaactggcacaag

SEQ ID NO: 1223 - DNA, 50 bp, synthetic construct
  source 1..50: mol_type = other DNA
tcagggatgccctctctcaccacttctattcaacatagtgttggaagttc

SEQ ID NO: 1224 - DNA, 50 bp, synthetic construct
  source 1..50: mol_type = other DNA
tggccagagcaattaggcaagagaaagaaataaagggtattcaattagga

SEQ ID NO: 1225 - DNA, 50 bp, synthetic construct
  source 1..50: mol_type = other DNA
aatgaggaagtcaaattgtccgtgtttgcagatgacatgattgtatatta

SEQ ID NO: 1226 - DNA, 50 bp, synthetic construct
  source 1..50: mol_type = other DNA
gaaaaccccatcgcctcagcccaaaatctcctaagctgataatccacctc

SEQ ID NO: 1227 - DNA, 50 bp, synthetic construct
  source 1..50: mol_type = other DNA
agcaaagtctcaggatacaaaatcaacgtgcaaaaatcacaagcattcct

SEQ ID NO: 1228 - DNA, 50 bp, synthetic construct
  source 1..50: mol_type = other DNA
atacaccattaacagacaaacggagagccaaatcatgaatgaactcccat

SEQ ID NO: 1229 - DNA, 50 bp, synthetic construct
  source 1..50: mol_type = other DNA
tcacaattgctacaaagagaataaaatacctaggaatccaacttacaacg

SEQ ID NO: 1230 - DNA, 50 bp, synthetic construct
  source 1..50: mol_type = other DNA
gatgtgaaggacctcttcaaggagaactataaaccactgctcagtgaaat

SEQ ID NO: 1231 - DNA, 50 bp, synthetic construct
  source 1..50: mol_type = other DNA
aaaagatgacacaaacaaatggaagaatattccatgctcatggataggaa

SEQ ID NO: 1232 - DNA, 50 bp, synthetic construct
  source 1..50: mol_type = other DNA
gaatcaatatcatgaaaatggccatgctgcccaaagattcaatgccatcc

SEQ ID NO: 1233 - DNA, 50 bp, synthetic construct
  source 1..50: mol_type = other DNA
ccatcaagctaccaatgactttcttcacagaattggaaaaaactacttta

SEQ ID NO: 1234 - DNA, 50 bp, synthetic construct
  source 1..50: mol_type = other DNA
aggttcatatggaaccaaaaaatggcctgcattgccaagacaatcctaag

SEQ ID NO: 1235 - DNA, 50 bp, synthetic construct
  source 1..50: mol_type = other DNA
ccaaaagaacaaagctggaggcatcacgctacctgactttaagctatcct

SEQ ID NO: 1236 - DNA, 50 bp, synthetic construct
  source 1..50: mol_type = other DNA
acaaggctacagtaaccaaaacagcatggtactggtaccaaaacagagag

SEQ ID NO: 1237 - DNA, 50 bp, synthetic construct
  source 1..50: mol_type = other DNA
atacaccagtgggacaggtctcagaaataacactacacatctataaccat

SEQ ID NO: 1238 - DNA, 50 bp, synthetic construct
  source 1..50: mol_type = other DNA
ctaatctttgacaaacctgacaaaaataagaaatggggaaagtattccgt

SEQ ID NO: 1239 - DNA, 50 bp, synthetic construct
  source 1..50: mol_type = other DNA
acttaataaatggtgctgggaaaactggctagccatatgtagaaagctga

SEQ ID NO: 1240 - DNA, 50 bp, synthetic construct
  source 1..50: mol_type = other DNA
aactggatcccttacaccttatacaaaaattaattcaagatggattaaag

SEQ ID NO: 1241 - DNA, 50 bp, synthetic construct
  source 1..50: mol_type = other DNA
acttaaatgttagacctaaaaccataaaaaccctagaagaaaacctaggc

SEQ ID NO: 1242 - skipped

SEQ ID NO: 1243 - DNA, 50 bp, synthetic construct
  source 1..50: mol_type = other DNA
caaataggaatagctccggtctgcagctctcagcatgaccgatgcagaag

SEQ ID NO: 1244 - DNA, 50 bp, synthetic construct
  source 1..50: mol_type = other DNA
atgggtgatttctgcgtttccaactgaggtaactagttcatctcattggg

SEQ ID NO: 1245 - DNA, 50 bp, synthetic construct
  source 1..50: mol_type = other DNA
actggttggacaggggatgcagcccatggagggtgagctgaagcagggcg

SEQ ID NO: 1246 - DNA, 50 bp, synthetic construct
  source 1..50: mol_type = other DNA
gggcatcacctcacccaggaagtgcaacaggttgggggatttccctttcc

SEQ ID NO: 1247 - DNA, 50 bp, synthetic construct
  source 1..50: mol_type = other DNA
tagccaagggaagccttcacagactacctggaaaaatgggacactcccgc

SEQ ID NO: 1248 - DNA, 50 bp, synthetic construct
  source 1..50: mol_type = other DNA
ccaaatactgtgcttttcccaaggtcttagcaaccagcagacaaggtgat

SEQ ID NO: 1249 - DNA, 50 bp, synthetic construct
  source 1..50: mol_type = other DNA
tctctcccgtgcctggctcggcggctcccacgcccatggagccttgctca

SEQ ID NO: 1250 - DNA, 50 bp, synthetic construct
  source 1..50: mol_type = other DNA
ctgctagcacagcggtctgagatccatctgtgagacaggagcctgactgg

SEQ ID NO: 1251 - DNA, 50 bp, synthetic construct
  source 1..50: mol_type = other DNA
gggaggggcatccgccattgctgaggcttgagtaggtaaacaaagcggcc

SEQ ID NO: 1252 - DNA, 50 bp, synthetic construct
  source 1..50: mol_type = other DNA
aggaagctcaaactgggtggagcccactgcagctcaacaaggcctactgc

SEQ ID NO: 1253 - DNA, 50 bp, synthetic construct
  source 1..50: mol_type = other DNA
ctctagactccaccactgtgggcagggcatagctgaaaaataggcagcag

SEQ ID NO: 1254 - DNA, 50 bp, synthetic construct
  source 1..50: mol_type = other DNA
acaactgcagacttaaacatccctgtctgatagctctgaagagagcagtg

SEQ ID NO: 1255 - DNA, 50 bp, synthetic construct
  source 1..50: mol_type = other DNA
gttctcccagcacggcatctgagctctgagaacggacagaatgcctcctg

SEQ ID NO: 1256 - DNA, 50 bp, synthetic construct
  source 1..50: mol_type = other DNA
aagtgggtccctgacccctgtgtagcctaactgggagacacctcccagta

SEQ ID NO: 1257 - DNA, 50 bp, synthetic construct
  source 1..50: mol_type = other DNA
ggggccgacagacacctcacataggcagctgcccctctgggacgaagctt

SEQ ID NO: 1258 - DNA, 50 bp, synthetic construct
  source 1..50: mol_type = other DNA
ccagaggaaggatcaggcagcaatatttgctgttctgcagcctctgctgg

SEQ ID NO: 1259 - DNA, 50 bp, synthetic construct
  source 1..50: mol_type = other DNA
tctggagtggaactccagcaaactccaaaagacctacagctgagggacct

SEQ ID NO: 1260 - DNA, 50 bp, synthetic construct
  source 1..50: mol_type = other DNA
gactgttagaaggaaaacagaaaggaatagcatcaacaaacagaaaggaa

SEQ ID NO: 1261 - DNA, 50 bp, synthetic construct
  source 1..50: mol_type = other DNA
tagcatcaacatcaacaaaaaggtcatctacaccaaaaccccatctgtcg

SEQ ID NO: 1262 - DNA, 50 bp, synthetic construct
  source 1..50: mol_type = other DNA
gtcaccaacatcaaagaccaaaggtagataaaaccacaaagatggggaga

SEQ ID NO: 1263 - DNA, 50 bp, synthetic construct
  source 1..50: mol_type = other DNA
aaccagagcagaaaagctgaaaattctaaaaatcagagcacctcttcttc

SEQ ID NO: 1264 - DNA, 50 bp, synthetic construct
  source 1..50: mol_type = other DNA
tccaaaggattgcagcttcttgccagcaacggaacaaagctggacggaga

SEQ ID NO: 1265 - DNA, 50 bp, synthetic construct
  source 1..50: mol_type = other DNA
atgactttgacgagttgacagaagcaggcttcaggaggtcagtaataaca

SEQ ID NO: 1266 - DNA, 50 bp, synthetic construct
  source 1..50: mol_type = other DNA
aacttctccgagctaaaggaggatgttcgaacccatcgcaaggaagctaa

SEQ ID NO: 1267 - DNA, 50 bp, synthetic construct
  source 1..50: mol_type = other DNA
acaccatgaaaaaagattagatgaatagctaactagaataaagagtgtag

SEQ ID NO: 1268 - DNA, 50 bp, synthetic construct
  source 1..50: mol_type = other DNA
agaagaccttaaatgacctgatggagctgataaccattgcacaagaactt

SEQ ID NO: 1269 - DNA, 50 bp, synthetic construct
  source 1..50: mol_type = other DNA
cacgacacatgcacaagcttcaatagccaattcgatcaagaggaagaaag

SEQ ID NO: 1270 - DNA, 50 bp, synthetic construct
  source 1..50: mol_type = other DNA
agtatcagtgattgaaggtcaaattaatgaaataaagtgagaagacaagg

SEQ ID NO: 1271 - DNA, 50 bp, synthetic construct
  source 1..50: mol_type = other DNA
ttagagaaaaaaaagtaaaaagaaacaaacaaagcctccaagaaatatgg

SEQ ID NO: 1272 - DNA, 50 bp, synthetic construct
  source 1..50: mol_type = other DNA
gactatgtgaaaagaccaaatctacatttgattggtgtacctgaaagtga

SEQ ID NO: 1273 - DNA, 50 bp, synthetic construct
  source 1..50: mol_type = other DNA
cggggagaatggaaccaagttggaaaacactctgcaggatattacccagg

SEQ ID NO: 1274 - DNA, 50 bp, synthetic construct
  source 1..50: mol_type = other DNA
agaacttccccagcctagcaaggcaggccaatatttaaattcaggaaatg

SEQ ID NO: 1275 - DNA, 50 bp, synthetic construct
  source 1..50: mol_type = other DNA
cagagaacaccacaaagatactccttgagaagagcaactccaagccacat

SEQ ID NO: 1276 - DNA, 50 bp, synthetic construct
  source 1..50: mol_type = other DNA
aattgtcagattccccaaggttgaaatgaaggaaaaagtgttaagggcag

SEQ ID NO: 1277 - DNA, 50 bp, synthetic construct
  source 1..50: mol_type = other DNA
ccagagagaaaggttgattacccacaaagggaagcccatcagactaacag

SEQ ID NO: 1278 - DNA, 50 bp, synthetic construct
  source 1..50: mol_type = other DNA
tggatctctcggcagaaaccctacaagccagaagagagtgggggccaata

SEQ ID NO: 1279 - DNA, 50 bp, synthetic construct
  source 1..50: mol_type = other DNA
ttcaacattcttaaaggaaagaattttcaacccagaatttcgtatctagc

SEQ ID NO: 1280 - DNA, 50 bp, synthetic construct
  source 1..50: mol_type = other DNA
caaactaagcttcataagtgaaggagaaataaaatactttacagacaaag

SEQ ID NO: 1281 - DNA, 50 bp, synthetic construct
  source 1..50: mol_type = other DNA
caaatgctgagagattttgtcaccaccaggcctgccttgcaagagctcct

SEQ ID NO: 1282 - DNA, 50 bp, synthetic construct
  source 1..50: mol_type = other DNA
gaaagaagcactaaacatggaaagaaacaactggtaccagccactgcaaa

SEQ ID NO: 1283 - DNA, 50 bp, synthetic construct
  source 1..50: mol_type = other DNA
aacaggccaaattgtaaagaccatcgatgctatgaagaaactgcatcaat

SEQ ID NO: 1284 - DNA, 50 bp, synthetic construct
  source 1..50: mol_type = other DNA
taatgggcaaaataaccagcgaacatcataatgacaggatcaaattcaca

SEQ ID NO: 1285 - DNA, 50 bp, synthetic construct
  source 1..50: mol_type = other DNA
cataacaatgttaactttaaatgtaaatgggctaaatgccccaattaaaa

SEQ ID NO: 1286 - DNA, 50 bp, synthetic construct
  source 1..50: mol_type = other DNA
gacacagactggcaaattggataaagagtcaagacccatcagtgtgctgt

SEQ ID NO: 1287 - DNA, 50 bp, synthetic construct
  source 1..50: mol_type = other DNA
attcaggaaacccatctcacatgcagagagacacacaggctcaaaataaa

SEQ ID NO: 1288 - DNA, 50 bp, synthetic construct
  source 1..50: mol_type = other DNA
gggatggaggaagatctaccaagcaaatggaaaacaaaaaaaggcagggg

SEQ ID NO: 1289 - DNA, 50 bp, synthetic construct
  source 1..50: mol_type = other DNA
ttgcaatcctagtctcggataaaacagactttaaaccaacagagatcaaa

SEQ ID NO: 1290 - DNA, 50 bp, synthetic construct
  source 1..50: mol_type = other DNA
agagacaaagaaggccattacataatggtaaagggatcaattcaataaga

SEQ ID NO: 1291 - DNA, 50 bp, synthetic construct
  source 1..50: mol_type = other DNA
agaactaactatcctaaatatatatgcacccaatacaggagcacccagat

SEQ ID NO: 1292 - DNA, 50 bp, synthetic construct
  source 1..50: mol_type = other DNA
tcataaagcaagttctgagtgacctacaaagagacttagactcccacaca

SEQ ID NO: 1293 - DNA, 50 bp, synthetic construct
  source 1..50: mol_type = other DNA
ataataatgggagactttaacaccccactgtcaacattagacagatcaac

SEQ ID NO: 1294 - DNA, 50 bp, synthetic construct
  source 1..50: mol_type = other DNA
gagacagaaagtgaagaaggatacccaggaattgaactcagctctgcaac

SEQ ID NO: 1295 - DNA, 50 bp, synthetic construct
  source 1..50: mol_type = other DNA
aagcagacctaatagacatctacagaactctccaccccaaatcaacagaa

SEQ ID NO: 1296 - DNA, 50 bp, synthetic construct
  source 1..50: mol_type = other DNA
tatacattcttctcagcaccacatcgcacttattcaaaaattgaccacat

SEQ ID NO: 1297 - DNA, 50 bp, synthetic construct
  source 1..50: mol_type = other DNA
aattggaagtaaagcactcctcagcaaatgtaaaagaatagaaatcacaa

SEQ ID NO: 1298 - DNA, 50 bp, synthetic construct
  source 1..50: mol_type = other DNA
caaactgtctctcagaccacagtgtaatcaaattagaacttaggattaag

SEQ ID NO: 1299 - DNA, 50 bp, synthetic construct
  source 1..50: mol_type = other DNA
aaactcactcaaaactgcacaactacatggaaactgaacaacttgctcct

SEQ ID NO: 1300 - DNA, 50 bp, synthetic construct
  source 1..50: mol_type = other DNA
gaatgacgggtaaataacgaaatgaagacagaaataaagatgttctttga

SEQ ID NO: 1301 - DNA, 50 bp, synthetic construct
  source 1..50: mol_type = other DNA
aaccagtgagaacaaaggcacaacgtaccagaatctcttggacacattta

SEQ ID NO: 1302 - DNA, 50 bp, synthetic construct
  source 1..50: mol_type = other DNA
aatcaccttaatttaaagcagtgcgtagagggaaattaatagcactaaat

SEQ ID NO: 1303 - DNA, 50 bp, synthetic construct
  source 1..50: mol_type = other DNA
gcccacaagagaaagcaggaaagatctaaaattgacaccctaacatcaca

SEQ ID NO: 1304 - DNA, 50 bp, synthetic construct
  source 1..50: mol_type = other DNA
atttaaaaaactagagaagcaagagcaaacaaattcaaaagctagcagaa

SEQ ID NO: 1305 - DNA, 50 bp, synthetic construct
  source 1..50: mol_type = other DNA
ggcaagaaataactaagatcaaagcagaactgaaggagatagagacaaaa

SEQ ID NO: 1306 - DNA, 50 bp, synthetic construct
  source 1..50: mol_type = other DNA
aaaacccttcaaaaaaaatcaatgaatccaggagctggttttttgaaaag

SEQ ID NO: 1307 - DNA, 50 bp, synthetic construct
  source 1..50: mol_type = other DNA
atcaacaaaattgactgactgctagcaagactaataaagaagaatcaaat

SEQ ID NO: 1308 - DNA, 50 bp, synthetic construct
  source 1..50: mol_type = other DNA
agatgccataaaaaatgataaaggggatatcaccactgatcccacagaag

SEQ ID NO: 1309 - DNA, 50 bp, synthetic construct
  source 1..50: mol_type = other DNA
tacaaactaccatcagagaataaacacctctatgcaaataatctagaaaa

SEQ ID NO: 1310 - DNA, 50 bp, synthetic construct
  source 1..50: mol_type = other DNA
tctagaaaaaatggataaattcctggacacatacaccctcccaagactaa

SEQ ID NO: 1311 - DNA, 50 bp, synthetic construct
  source 1..50: mol_type = other DNA
accaggaagaagttgaatctctaaatagaccagtaacaggctctgaaatt

SEQ ID NO: 1312 - DNA, 50 bp, synthetic construct
  source 1..50: mol_type = other DNA
gaggtaataattaatagcctaccaaccaaaaaaagtccaggaccagatgg

SEQ ID NO: 1313 - DNA, 50 bp, synthetic construct
  source 1..50: mol_type = other DNA
attcacagcctaattctaccagaggtacaaggaggagctggtatcattcc

SEQ ID NO: 1314 - DNA, 50 bp, synthetic construct
  source 1..50: mol_type = other DNA
ttctgaaactatttcaatcaacagaaaaagaggaaatcctccctaactca

SEQ ID NO: 1315 - DNA, 50 bp, synthetic construct
  source 1..50: mol_type = other DNA
ttttatgaggccagaatcatcctgataccaaagcctgggagacacacaac

SEQ ID NO: 1316 - DNA, 50 bp, synthetic construct
  source 1..50: mol_type = other DNA
aaaaaaagagaatttcagatcaatatccctgatgaacattgatgtgaaaa

SEQ ID NO: 1317 - DNA, 50 bp, synthetic construct
  source 1..50: mol_type = other DNA
tcctcaataaaacactggcaaacgaagtccagcagcacatcaaaaagctt

SEQ ID NO: 1318 - DNA, 50 bp, synthetic construct
  source 1..50: mol_type = other DNA
atccaccatgatcaagtgggcttcatccctgggatgcaaggctggttcaa

SEQ ID NO: 1319 - DNA, 50 bp, synthetic construct
  source 1..50: mol_type = other DNA
catatgcaaatcaataaacataatccatcgtataaacagaaccaatgaca

SEQ ID NO: 1320 - DNA, 50 bp, synthetic construct
  source 1..50: mol_type = other DNA
aaaaccacatgattatctcaatagatgcagaaaaggcctttgacaaaatt

SEQ ID NO: 1321 - DNA, 50 bp, synthetic construct
  source 1..50: mol_type = other DNA
caacatcccttcatgctaaaaactctcaataaactaggtattgatggaaa

SEQ ID NO: 1322 - DNA, 50 bp, synthetic construct
  source 1..50: mol_type = other DNA
atatctcaaaataataagagctatttatgacaaacccacagccaatatca

SEQ ID NO: 1323 - DNA, 50 bp, synthetic construct
  source 1..50: mol_type = other DNA
tcctgaatgggcaaaaactggaagcattccatttgaaaaccagcacaaga

SEQ ID NO: 1324 - DNA, 50 bp, synthetic construct
  source 1..50: mol_type = other DNA
caaggatgccctctctcaccactcctattcaacatagtgttggaagttct

SEQ ID NO: 1325 - DNA, 50 bp, synthetic construct
  source 1..50: mol_type = other DNA
ggctagggcaatcaggcaagagaaagaaataaagcgtattcaattaggaa

SEQ ID NO: 1326 - DNA, 50 bp, synthetic construct
  source 1..50: mol_type = other DNA
atggggaagtcaaactgtccctgtttgcagatgacatgattgtgtattta

SEQ ID NO: 1327 - DNA, 50 bp, synthetic construct
  source 1..50: mol_type = other DNA
gaaaaccccatcatctcagcccaaaatctccttatgctgataagcaactt

SEQ ID NO: 1328 - DNA, 50 bp, synthetic construct
  source 1..50: mol_type = other DNA
cagcaaagtctcaggatacaaaatcaatgtgcaaaaatcacaagcattcc

SEQ ID NO: 1329 - DNA, 50 bp, synthetic construct
  source 1..50: mol_type = other DNA
tatacaccattaacagataaacagagagccaaatcatgagtgaactccca

SEQ ID NO: 1330 - DNA, 50 bp, synthetic construct
  source 1..50: mol_type = other DNA
ttcacagttgctacaaagagaataaaatacctaggaatccaacttacaag

SEQ ID NO: 1331 - DNA, 50 bp, synthetic construct
  source 1..50: mol_type = other DNA
ggatgtgaaggacctcttcaaggacaattacaaaccactgctcaacgaaa

SEQ ID NO: 1332 - DNA, 50 bp, synthetic construct
  source 1..50: mol_type = other DNA
taaaagaggacacaaacaaatggaagaatattccattctcatggatagga

SEQ ID NO: 1333 - DNA, 50 bp, synthetic construct
  source 1..50: mol_type = other DNA
agaatcaatatcatgaaaatggccatactgcccaaagtaatgtatagatt

SEQ ID NO: 1334 - DNA, 50 bp, synthetic construct
  source 1..50: mol_type = other DNA
caatgtcatccccatcaagctaccagtgactttcttcacagaattagaaa

SEQ ID NO: 1335 - DNA, 50 bp, synthetic construct
  source 1..50: mol_type = other DNA
aaactactttaaagttcatatggaaccaaaaaagagcccgcattgccaag

SEQ ID NO: 1336 - DNA, 50 bp, synthetic construct
  source 1..50: mol_type = other DNA
acaatcctaagcaaaaacaacaaagctagaggcatcacgctacctgactt

SEQ ID NO: 1337 - DNA, 50 bp, synthetic construct
  source 1..50: mol_type = other DNA
caaactatactacaaagctacagtaaccaaatcagcatggtactggtacc

SEQ ID NO: 1338 - DNA, 50 bp, synthetic construct
  source 1..50: mol_type = other DNA
aaaacagagatatacaccaatggaacagaaaagaggcctgagaaataata

SEQ ID NO: 1339 - DNA, 50 bp, synthetic construct
  source 1..50: mol_type = other DNA
ccacacatctacaaccatctgatctttgacaaacctgacaaaaacaagaa

SEQ ID NO: 1340 - DNA, 50 bp, synthetic construct
  source 1..50: mol_type = other DNA
acggggaaaggattccctatttaataaatggtgctgggaaaactggctag

SEQ ID NO: 1341 - DNA, 50 bp, synthetic construct
  source 1..50: mol_type = other DNA
ccatatgtagaaagctgaaactggatcccctccttacaccttatacaaaa

SEQ ID NO: 1342 - DNA, 50 bp, synthetic construct
  source 1..50: mol_type = other DNA
actaattcaagatggattaaagacttaaatgttagacctaaaaccataaa

SEQ ID NO: 1343 - DNA, 28 bp, synthetic construct
  source 1..28: mol_type = other DNA
aaccctagaagaaaacctaggcaatacc

SEQ ID NO: 1344 - DNA, 50 bp, synthetic construct
  source 1..50: mol_type = other DNA
caaataggaacagctccggtctgcagctcccagcgtgatcgacatagaag

SEQ ID NO: 1345 - DNA, 50 bp, synthetic construct
  source 1..50: mol_type = other DNA
aagggtgatttccgcattttcaactgaggtacctggttcatctcattggg

SEQ ID NO: 1346 - DNA, 50 bp, synthetic construct
  source 1..50: mol_type = other DNA
actggttggacagtgggtgcagcccacagagggcgagccaaagcagggtg

SEQ ID NO: 1347 - DNA, 50 bp, synthetic construct
  source 1..50: mol_type = other DNA
gagtgtcacttcacccaggaagcacaggggttgggggatttccctttcct

SEQ ID NO: 1348 - DNA, 50 bp, synthetic construct
  source 1..50: mol_type = other DNA
agccaagggaagccatgacagacggtacctggaaaatcggtacactcctg

SEQ ID NO: 1349 - DNA, 50 bp, synthetic construct
  source 1..50: mol_type = other DNA
cccaaatactgcttttcctacggtcttagcaaccagcagaccaggaggtt

SEQ ID NO: 1350 - DNA, 50 bp, synthetic construct
  source 1..50: mol_type = other DNA
ctctcctgtgcctggctcagagggccccacacccacggagccttgctcac

SEQ ID NO: 1351 - DNA, 50 bp, synthetic construct
  source 1..50: mol_type = other DNA
tgctagcacagcagtctgagatcgacctgcgaggctgcagcctggctggg

SEQ ID NO: 1352 - DNA, 50 bp, synthetic construct
  source 1..50: mol_type = other DNA
ggaggggcatacaccattgctgaggcttgagtaggtaaacaaaatggtca

SEQ ID NO: 1353 - DNA, 50 bp, synthetic construct
  source 1..50: mol_type = other DNA
ggaagctcaaactgggcacagcccaccacagctcagcaagacctactgcc

SEQ ID NO: 1354 - DNA, 50 bp, synthetic construct
  source 1..50: mol_type = other DNA
tctacaggctccacctctgtgggcagggcatagctaaacaaaaggcagca

SEQ ID NO: 1355 - DNA, 50 bp, synthetic construct
  source 1..50: mol_type = other DNA
gacaacttccgcagacttaaacatccctatctaacagctctgaagagagc

SEQ ID NO: 1356 - DNA, 50 bp, synthetic construct
  source 1..50: mol_type = other DNA
agtggttctcccagcacagcgcttgagctctgagaacagacagactgcct

SEQ ID NO: 1357 - DNA, 50 bp, synthetic construct
  source 1..50: mol_type = other DNA
cctcaagtgagtccctgacccccgtgtagcctaactgggagacacctccc

SEQ ID NO: 1358 - DNA, 50 bp, synthetic construct
  source 1..50: mol_type = other DNA
agtaggggcagacagacacctcatatagacgggtgaccctctgggatgaa

SEQ ID NO: 1359 - DNA, 50 bp, synthetic construct
  source 1..50: mol_type = other DNA
gctttcagaggaaggattaggcagcaatatttgctgttctgcagcctctg

SEQ ID NO: 1360 - DNA, 50 bp, synthetic construct
  source 1..50: mol_type = other DNA
ctggtgatacccagacaaacagggtctggagtggacctccagcaaactcc

SEQ ID NO: 1361 - DNA, 50 bp, synthetic construct
  source 1..50: mol_type = other DNA
agcagacctgcactgactgttaggaggaaaactaacaaacagaaaggaat

SEQ ID NO: 1362 - DNA, 50 bp, synthetic construct
  source 1..50: mol_type = other DNA
agcatcaacatcaacatcaacaaaaaggacatccacaccaaaaccaagcc

SEQ ID NO: 1363 - DNA, 50 bp, synthetic construct
  source 1..50: mol_type = other DNA
aacatcaaagaccaaaggtagataaaaccacgaagatggggagaaaccag

SEQ ID NO: 1364 - DNA, 50 bp, synthetic construct
  source 1..50: mol_type = other DNA
agcagaaaagctgaaaattctaaagaacagagcacctcttctcctccaaa

SEQ ID NO: 1365 - DNA, 50 bp, synthetic construct
  source 1..50: mol_type = other DNA
ggatcgcagctcctcgccagcaacagaacaaaactgggtggaaaatgact

SEQ ID NO: 1366 - DNA, 50 bp, synthetic construct
  source 1..50: mol_type = other DNA
ttgacgagttgacagaagtaggcttcagaaggtcgataataacaaacttc

SEQ ID NO: 1367 - DNA, 50 bp, synthetic construct
  source 1..50: mol_type = other DNA
tctgagttaaaggagcatgagctaacccattgcaaggaagctagaaacct

SEQ ID NO: 1368 - DNA, 50 bp, synthetic construct
  source 1..50: mol_type = other DNA
tgaaaaaaggttagacgaatggctaactagaataaacagtgtagagaaga

SEQ ID NO: 1369 - DNA, 50 bp, synthetic construct
  source 1..50: mol_type = other DNA
ccttaaatgacctgatggagctgaaaaccatggcacgagaacttcgtaac

SEQ ID NO: 1370 - DNA, 50 bp, synthetic construct
  source 1..50: mol_type = other DNA
acatgcacaaacttcaatagctgattcgatcaagtggaagaaaggatatc

SEQ ID NO: 1371 - DNA, 50 bp, synthetic construct
  source 1..50: mol_type = other DNA
cgtgattgaagatcaaattaatgaaataaagcgagaagacaagattagag

SEQ ID NO: 1372 - DNA, 50 bp, synthetic construct
  source 1..50: mol_type = other DNA
aaaaaaagagtaaaaagaaacaaacaaagcctacaagaaatatgggacta

SEQ ID NO: 1373 - DNA, 50 bp, synthetic construct
  source 1..50: mol_type = other DNA
tgtgaaaagaccaaatctacgtttgattggtgtacctgaaagtgatgggg

SEQ ID NO: 1374 - DNA, 50 bp, synthetic construct
  source 1..50: mol_type = other DNA
agaatggaaccaagttggaaaacactcttcaggatattatccaggagaac

SEQ ID NO: 1375 - DNA, 50 bp, synthetic construct
  source 1..50: mol_type = other DNA
ttccccaacctagcaaggcagaccaacattcaaattcaggaaatacagag

SEQ ID NO: 1376 - DNA, 50 bp, synthetic construct
  source 1..50: mol_type = other DNA
aacaccacaaagatactcctcaagaagagcaacgccaagacacataattg

SEQ ID NO: 1377 - DNA, 50 bp, synthetic construct
  source 1..50: mol_type = other DNA
tcagattcaccaaagtttaaatgaaggaaaaaatgttaaggccagccaga

SEQ ID NO: 1378 - DNA, 50 bp, synthetic construct
  source 1..50: mol_type = other DNA
gagaaaagtcgagttaccgagaaagggaagcccatcagactaacagcgga

SEQ ID NO: 1379 - DNA, 50 bp, synthetic construct
  source 1..50: mol_type = other DNA
tctctcagcagaaaccctacaagccagaagagagtgggggccaatattca

SEQ ID NO: 1380 - DNA, 50 bp, synthetic construct
  source 1..50: mol_type = other DNA
acattcttaaagaaaagaatttttaacccagaatttcatatccagccaaa

SEQ ID NO: 1381 - DNA, 50 bp, synthetic construct
  source 1..50: mol_type = other DNA
ctaagcttcataagtgaaggagaaataaaatcctttacagacaagcaaat

SEQ ID NO: 1382 - DNA, 50 bp, synthetic construct
  source 1..50: mol_type = other DNA
gctgagagattttgtcaccaccaggcctgccttacaagagctcctgaagg

SEQ ID NO: 1383 - DNA, 50 bp, synthetic construct
  source 1..50: mol_type = other DNA
aagcactaaacatggagaggaacaactggtaccagccactgcaaaaacat

SEQ ID NO: 1384 - DNA, 50 bp, synthetic construct
  source 1..50: mol_type = other DNA
gccaaattgtaaagaccattgatgctatgaagaaactgcatcaattaatg

SEQ ID NO: 1385 - DNA, 50 bp, synthetic construct
  source 1..50: mol_type = other DNA
ggcaaaataaccagctaacatcataatgacaggatcaaattcacacataa

SEQ ID NO: 1386 - DNA, 50 bp, synthetic construct
  source 1..50: mol_type = other DNA
caattattaaccttaaatgtaaatgggctaaatgtcccaattaaaagaca

SEQ ID NO: 1387 - DNA, 50 bp, synthetic construct
  source 1..50: mol_type = other DNA
aagactggcaaattggataaagagtcaagacccatcagtgtgctgtattc

SEQ ID NO: 1388 - DNA, 50 bp, synthetic construct
  source 1..50: mol_type = other DNA
aggatacccatctcacgtgcagagacacacataggctcaaagtaaaggga

SEQ ID NO: 1389 - DNA, 50 bp, synthetic construct
  source 1..50: mol_type = other DNA
tggaggaagatctaccaagcaaatggaaagcaaaaaaaagcaagagttgc

SEQ ID NO: 1390 - DNA, 50 bp, synthetic construct
  source 1..50: mol_type = other DNA
aatcctgataaataaatctctgataaaacagactctaaaccaacaaagat

SEQ ID NO: 1391 - DNA, 50 bp, synthetic construct
  source 1..50: mol_type = other DNA
caaaagagacaaagaaggccattacataatggtaaaggaatcaattcaac

SEQ ID NO: 1392 - DNA, 50 bp, synthetic construct
  source 1..50: mol_type = other DNA
aagaagagctaactatcctaaatatatatgcagccaatacagcagcaccc

SEQ ID NO: 1393 - DNA, 50 bp, synthetic construct
  source 1..50: mol_type = other DNA
agattcataaagcaagtccttagagacctacaaagaaacttagactccca

SEQ ID NO: 1394 - DNA, 50 bp, synthetic construct
  source 1..50: mol_type = other DNA
cacagtaataataggagactttaacacctcactgtcaatattagacagat

SEQ ID NO: 1395 - DNA, 50 bp, synthetic construct
  source 1..50: mol_type = other DNA
caacaagacagaaggttaacaaggatatccaggacttgaacttggctttg

SEQ ID NO: 1396 - DNA, 50 bp, synthetic construct
  source 1..50: mol_type = other DNA
caccaagcagacctaatagatagctacagaactctccaccccaaatcgac

SEQ ID NO: 1397 - DNA, 50 bp, synthetic construct
  source 1..50: mol_type = other DNA
agaatatacattcttctcagcaccacatcgcacttattctaaaattgacc

SEQ ID NO: 1398 - DNA, 50 bp, synthetic construct
  source 1..50: mol_type = other DNA
acataattggaagtaaagcactcctcagcaaatgtaaaagaacagaaatc

SEQ ID NO: 1399 - DNA, 50 bp, synthetic construct
  source 1..50: mol_type = other DNA
acaacaaactggctctcagactacagtgcaatcaaattagaaatcaggat

SEQ ID NO: 1400 - DNA, 50 bp, synthetic construct
  source 1..50: mol_type = other DNA
taagaaactcactcaaaaccacacgactacatggaaactgaacaacttgc

SEQ ID NO: 1401 - DNA, 50 bp, synthetic construct
  source 1..50: mol_type = other DNA
tcctgaatgactactgggcaaataacaaaatgaaggcaaaaataaagatg

SEQ ID NO: 1402 - DNA, 50 bp, synthetic construct
  source 1..50: mol_type = other DNA
ttctttgaaactaatgagaacaaagacacaacataccagaatctctggaa

SEQ ID NO: 1403 - DNA, 50 bp, synthetic construct
  source 1..50: mol_type = other DNA
cacatttaaagcagtatgtagggggaaatttatagcactaaatgcccaca

SEQ ID NO: 1404 - DNA, 50 bp, synthetic construct
  source 1..50: mol_type = other DNA
agagaaagcagaaaagatcaaaaatcgacaccctaacatcacaattaaaa

SEQ ID NO: 1405 - DNA, 50 bp, synthetic construct
  source 1..50: mol_type = other DNA
gaactagaaaagcaagagcaaacatattcaaaagctagcagaaggcaaga

SEQ ID NO: 1406 - DNA, 50 bp, synthetic construct
  source 1..50: mol_type = other DNA
aataactaagatcagagcagaactaaaagagatagagacacaagaaaccc

SEQ ID NO: 1407 - DNA, 50 bp, synthetic construct
  source 1..50: mol_type = other DNA
ttcaaaaaatgaatgaatccagaagctggttttttgaaaagatcaacaaa

SEQ ID NO: 1408 - DNA, 50 bp, synthetic construct
  source 1..50: mol_type = other DNA
attgatagaccactagcaagactaataaagaagaaaagagagatgaatca

SEQ ID NO: 1409 - DNA, 50 bp, synthetic construct
  source 1..50: mol_type = other DNA
aatagatgcaataaaaaatgataaaggggatatcaccaccgatcccacag

SEQ ID NO: 1410 - DNA, 50 bp, synthetic construct
  source 1..50: mol_type = other DNA
gaatacaaactaccatcagagaatactataaacacctctatgcaaataaa

SEQ ID NO: 1411 - DNA, 50 bp, synthetic construct
  source 1..50: mol_type = other DNA
ctagaaaatctagaagaaatggataaatttctggacacatacaccctccc

SEQ ID NO: 1412 - DNA, 50 bp, synthetic construct
  source 1..50: mol_type = other DNA
aagactaaaccaggaagaagtgaatccctgaatagacaggctctgaaatt

SEQ ID NO: 1413 - DNA, 50 bp, synthetic construct
  source 1..50: mol_type = other DNA
gaggcaataattaatggcctaccaaacaaaaaaagtccaggaccagatgg

SEQ ID NO: 1414 - DNA, 50 bp, synthetic construct
  source 1..50: mol_type = other DNA
attcacagccgaattctaccagaggtgcaaagaggagctggtaccattcc

SEQ ID NO: 1415 - DNA, 50 bp, synthetic construct
  source 1..50: mol_type = other DNA
ttctgaaactattccaatcaacagaaaaagagggaatcctccctaactca

SEQ ID NO: 1416 - DNA, 50 bp, synthetic construct
  source 1..50: mol_type = other DNA
ttttatgaggccaacatcatcctgataccaaagcctggcagagacacaac

SEQ ID NO: 1417 - DNA, 50 bp, synthetic construct
  source 1..50: mol_type = other DNA
aaaaaaagagaattttagaccaatatcccttatgaacatcgatgcgaaaa

SEQ ID NO: 1418 - DNA, 50 bp, synthetic construct
  source 1..50: mol_type = other DNA
tcctcaataaaatactggcaaaccgaatccagcagcacatcaaaaagctt

SEQ ID NO: 1419 - DNA, 50 bp, synthetic construct
  source 1..50: mol_type = other DNA
atccaccatgatcaagtcggcttcatccctaggatgcaaggctggttcaa

SEQ ID NO: 1420 - DNA, 50 bp, synthetic construct
  source 1..50: mol_type = other DNA
catactcaaatcaataaacgtaatccatcacataaacagaaccaatgaca

SEQ ID NO: 1421 - DNA, 50 bp, synthetic construct
  source 1..50: mol_type = other DNA
aaaaccacgttattatctcaatagatgcagaaaaggcctttgacaaaatt

SEQ ID NO: 1422 - DNA, 50 bp, synthetic construct
  source 1..50: mol_type = other DNA
caacagcgcttcatgctaaaaactgtcaataaactaggtgttgatggaat

SEQ ID NO: 1423 - DNA, 50 bp, synthetic construct
  source 1..50: mol_type = other DNA
gtatctcaaaataataagcgctatttatgacaaacccacagccaatatca

SEQ ID NO: 1424 - DNA, 50 bp, synthetic construct
  source 1..50: mol_type = other DNA
tactgaatgggcaaaaactggaagcattccctttgaaagcaggcacaaga

SEQ ID NO: 1425 - DNA, 50 bp, synthetic construct; identical to SEQ ID NO: 1324
  source 1..50: mol_type = other DNA

SEQ ID NO: 1426 - DNA, 50 bp, synthetic construct
  source 1..50: mol_type = other DNA
ggccagggcaatcaggcaagagaaagaaataaagggtattcaattaggaa

SEQ ID NO: 1427 - DNA, 50 bp, synthetic construct
  source 1..50: mol_type = other DNA
aagaggaagtcaaattgtccctgtttgcagatgacatgattgtatattta

SEQ ID NO: 1428 - DNA, 50 bp, synthetic construct
  source 1..50: mol_type = other DNA
gaaaaccccattgtctcagcacaaaatcttcttaagctgataagcaactt

SEQ ID NO: 1429 - DNA, 50 bp, synthetic construct
  source 1..50: mol_type = other DNA
cagaaaagtctcaggatacaaaatcaatgtgcaaaaatcacaagcattcc

SEQ ID NO: 1430 - DNA, 50 bp, synthetic construct
  source 1..50: mol_type = other DNA
tatacactaataacagacagagagccaaatcatgagtgaattcccattca

SEQ ID NO: 1431 - DNA, 50 bp, synthetic construct
  source 1..50: mol_type = other DNA
caattgctacaaagagaataaaataccaaggagtccaacttacaagggat

SEQ ID NO: 1432 - DNA, 50 bp, synthetic construct
  source 1..50: mol_type = other DNA
gtgaaggacctcttcaaggagaactacaaaccactgctcaatgaaataaa

SEQ ID NO: 1433 - DNA, 50 bp, synthetic construct
  source 1..50: mol_type = other DNA
agaggacacaaacaaatcgaagaacattccatgctcatgaataggaagaa

SEQ ID NO: 1434 - DNA, 50 bp, synthetic construct
  source 1..50: mol_type = other DNA
tcaatattgtgaaaatggccatactgcccaaagtaatttatagattcaat

SEQ ID NO: 1435 - DNA, 50 bp, synthetic construct
  source 1..50: mol_type = other DNA
gccatcaccatcaagctaccaatgactttcttcgcagaagtggaaaaaac

SEQ ID NO: 1436 - DNA, 50 bp, synthetic construct
  source 1..50: mol_type = other DNA
tactttaaagttcatgtggaaccaaaaaaagagcccgcatagccaagaca

SEQ ID NO: 1437 - DNA, 50 bp, synthetic construct
  source 1..50: mol_type = other DNA
atcctaagccaaaggaacaaagctggaggcatcacgctacctaacttcaa

SEQ ID NO: 1438 - DNA, 50 bp, synthetic construct
  source 1..50: mol_type = other DNA
actatactacaaggctacagtaaccaaaacagcatggtactggtaccaaa

SEQ ID NO: 1439 - DNA, 50 bp, synthetic construct
  source 1..50: mol_type = other DNA
acagatatatagaccaatggaacagagcagaggcctcagaaataacacca

SEQ ID NO: 1440 - DNA, 50 bp, synthetic construct
  source 1..50: mol_type = other DNA
cacatctacaaccatctgatctttgacaaacctaacaaaaacaagcaatg

SEQ ID NO: 1441 - DNA, 50 bp, synthetic construct
  source 1..50: mol_type = other DNA
gggaaaggattccctatttaataagtggtgctgggaaaactggctagcca

SEQ ID NO: 1442 - DNA, 50 bp, synthetic construct
  source 1..50: mol_type = other DNA
tatgtagaaagctgaaactggatcccttccttacaccttatacaaaaatt

SEQ ID NO: 1443 - DNA, 50 bp, synthetic construct
  source 1..50: mol_type = other DNA
aattcaagatggagtaaagacttaaatgtaagacctaaaaccataaaaac

SEQ ID NO: 1444 - DNA, 23 bp, synthetic construct
  source 1..23: mol_type = other DNA
cctagaagaaaacctaggcaatc

SEQ ID NO: 1445 - DNA, 50 bp, synthetic construct
  source 1..50: mol_type = other DNA
tctcctccaaaggatcgcagctcctcgccagcaacagaacaaagctggac

SEQ ID NO: 1446 - DNA, 50 bp, synthetic construct
  source 1..50: mol_type = other DNA
ggagaatgactttgacgagttgacagaagtaggcttcagaaggtcggtaa

SEQ ID NO: 1447 - DNA, 14 bp, synthetic construct
  source 1..14: mol_type = other DNA
taacaaacttctcc

SEQ ID NO: 1448 - DNA, 50 bp, synthetic construct; identical to SEQ ID NO: 1445
  source 1..50: mol_type = other DNA

SEQ ID NO: 1449 - DNA, 50 bp, synthetic construct; identical to SEQ ID NO: 1446
  source 1..50: mol_type = other DNA

SEQ ID NO: 1450 - DNA, 15 bp, synthetic construct
  source 1..15: mol_type = other DNA
taacaaacttctcca

SEQ ID NO: 1451 - DNA, 30 bp, synthetic construct
  source 1..30: mol_type = other DNA
tcattaactgttaaatggcccgcaatgaat

SEQ ID NO: 1452 - DNA, 20 bp, synthetic construct
  source 1..20: mol_type = other DNA
gtacttgttggtacatagta

SEQ ID NO: 1453 - DNA, 20 bp, synthetic construct
  source 1..20: mol_type = other DNA
taactgttaaatgaatgaat

SEQ ID NO: 1454 - DNA, 20 bp, synthetic construct
  source 1..20: mol_type = other DNA
acttgttggtacatagtaag

SEQ ID NO: 1455 - DNA, 50 bp, synthetic construct
  source 1..50: mol_type = other DNA
ggtggctcacgcctgtaatcccagcactttgggaggctgaggcgggtgga

SEQ ID NO: 1456 - skipped

SEQ ID NO: 1457 - DNA, 50 bp, synthetic construct
  source 1..50: mol_type = other DNA
gctgaggggcgggcggagcacttgaggtcaggagtttgagaccagcctgg

SEQ ID NO: 1458 - DNA, 32 bp, synthetic construct
  source 1..32: mol_type = other DNA
ccaacgtggtgaaaccccatctctactggaaa

SEQ ID NO: 1459 - DNA, 50 bp, synthetic construct
  source 1..50: mol_type = other DNA
gtggctcacacctgtaatcccagcactttgagaggctgaggcgggtggat

SEQ ID NO: 1460 - DNA, 50 bp, synthetic construct
  source 1..50: mol_type = other DNA
cacttcaggccacgagtttgagaccagcctggccaacatggcaaaatccc

SEQ ID NO: 1461 - DNA, 50 bp, synthetic construct
  source 1..50: mol_type = other DNA
atctctactaaaaatacaaaaattagccgggcatggtggtggttacctgt

SEQ ID NO: 1462 - DNA, 50 bp, synthetic construct
  source 1..50: mol_type = other DNA
aattcagctactcaggggactgaggcaggagaatcgctagaacccaggag

SEQ ID NO: 1463 - DNA, 50 bp, synthetic construct
  source 1..50: mol_type = other DNA
gcagaggttgcagtgagccaagatcgtgccactgcatgccaacctgggtg

SEQ ID NO: 1464 - DNA, 50 bp, synthetic construct
  source 1..50: mol_type = other DNA
acagagcaagattgtgtctcaaaaaaataataataataataagattttta

SEQ ID NO: 1465 - DNA, 21 bp, synthetic construct
  source 1..21: mol_type = other DNA
tttctggggttatattgaaaa

SEQ ID NO: 1466 - DNA, 50 bp, synthetic construct
  source 1..50: mol_type = other DNA
ggtggctcacgcctgtaatcccggcactttgggaggccgaggcgggtgta

SEQ ID NO: 1467 - DNA, 50 bp, synthetic construct
  source 1..50: mol_type = other DNA
ttacttgaggtcaggagttcgagaccagcctggccaacatggtgaaaccc

SEQ ID NO: 1468 - DNA, 15 bp, synthetic construct
  source 1..15: mol_type = other DNA
tatctctactgaaaa

SEQ ID NO: 1469 - DNA, 37 bp, synthetic construct
  source 1..37: mol_type = other DNA
ggagagaaggggaggtgggagaagagtatgagctgaa

SEQ ID NO: 1470 - DNA, 50 bp, synthetic construct
  source 1..50: mol_type = other DNA
tggagggagactagtagaatcatttggaagaggagatacaattgtcattg

SEQ ID NO: 1471 - DNA, 50 bp, synthetic construct
  source 1..50: mol_type = other DNA
tgggtttgtcagattggttactttcctgtccttccaaatccagaagggga

SEQ ID NO: 1472 - skipped

SEQ ID NO: 1473 - DNA, 20 bp, synthetic construct
  source 1..20: mol_type = other DNA
tcagcctttaaaaagcagga

SEQ ID NO: 1474 - DNA, 50 bp, synthetic construct
  source 1..50: mol_type = other DNA
tatgttaatttgcttgactgtaataatcatttcactatgtatatgcatat

SEQ ID NO: 1475 - DNA, 37 bp, synthetic construct
  source 1..37: mol_type = other DNA
caaaacatcatgttgtacaccttaaatatatataatt

SEQ ID NO: 1476 - DNA, 50 bp, synthetic construct
  source 1..50: mol_type = other DNA
tatgttaattagcttgatttaatcattttacaatgtatacatatatcaaa

SEQ ID NO: 1477 - DNA, 27 bp, synthetic construct
  source 1..27: mol_type = other DNA
acatcacattgtacaccataaatatat

SEQ ID NO: 1478 - DNA, 50 bp, synthetic construct
  source 1..50: mol_type = other DNA
tgtgttaattagcttgatttaatcattttacaatgtatacatatatcaaa

SEQ ID NO: 1479 - DNA, 31 bp, synthetic construct
  source 1..31: mol_type = other DNA
acatcacagggtacaccataaatatatataa

SEQ ID NO: 1480 - DNA, 50 bp, synthetic construct
  source 1..50: mol_type = other DNA
atgttaactagcttgatttaatcattccacaatgtttacatatatcaaaa

SEQ ID NO: 1481 - DNA, 34 bp, synthetic construct
  source 1..34: mol_type = other DNA
catcacattgtacaccataaagatatacaatttt

SEQ ID NO: 1482 - DNA, 33 bp, synthetic construct
  source 1..33: mol_type = other DNA
cttagaactgtgtctggcacacagaaagcactc

SEQ ID NO: 1483 - DNA, 30 bp, synthetic construct
  source 1..30: mol_type = other DNA
gtgtctggcacatagaaagtgctcaacatg

SEQ ID NO: 1484 - DNA, 41 bp, synthetic construct
  source 1..41: mol_type = other DNA
tgtttggctgtgtggttccattacctgtgtgccttgtcctt

SEQ ID NO: 1485 - DNA, 50 bp, synthetic construct
  source 1..50: mol_type = other DNA
tggcttatatctgtaatcctagcactttggtgggccaaggcaggaggatt

SEQ ID NO: 1486 - DNA, 50 bp, synthetic construct
  source 1..50: mol_type = other DNA
gcttgagcccaggaatttgagaccagccagggcaacatagtgagacccag

SEQ ID NO: 1487 - DNA, 50 bp, synthetic construct
  source 1..50: mol_type = other DNA
ctctacaaaaggttttaaaaaataagctgggcatggtggcatatgcctgt

SEQ ID NO: 1488 - DNA, 50 bp, synthetic construct
  source 1..50: mol_type = other DNA
aggcccagctccttggaggctgaggtgagaggatcacttgagcccaggaa

SEQ ID NO: 1489 - DNA, 50 bp, synthetic construct
  source 1..50: mol_type = other DNA
atcaaggctgcagtgagctatgattgcaccactgcactccagcctgggca

SEQ ID NO: 1490 - DNA, 50 bp, synthetic construct
  source 1..50: mol_type = other DNA
acaaagcaagacaccgccaaaaaaaaaaaaaaagcaaggataagggaaag

SEQ ID NO: 1491 - skipped

SEQ ID NO: 1492 - DNA, 50 bp, synthetic construct
  source 1..50: mol_type = other DNA
gtggctcatacctataatcccagcactttgggaggccgaggggggcagat

SEQ ID NO: 1493 - DNA, 50 bp, synthetic construct
  source 1..50: mol_type = other DNA
cacttgagcccaggagttcgagagcagcctgggcaacatgacgaaacccc

SEQ ID NO: 1494 - DNA, 50 bp, synthetic construct
  source 1..50: mol_type = other DNA
gtctctacagagaatacaaaaattagccaggcatggtggcccatgcctgt

SEQ ID NO: 1495 - DNA, 50 bp, synthetic construct
  source 1..50: mol_type = other DNA
agtacctgctattggtaaggctgaggtggaaggttcacttgagcctggga

SEQ ID NO: 1496 - DNA, 50 bp, synthetic construct
  source 1..50: mol_type = other DNA
ggtggaggttgtagtgagccaagatcgtgccactacactccagcctgggc

SEQ ID NO: 1497 - DNA, 40 bp, synthetic construct
  source 1..40: mol_type = other DNA
aacaaagcaagaccttgtctcaaaaaaaaaaaagaaaaaa

SEQ ID NO: 1498 - DNA, 50 bp, synthetic construct
  source 1..50: mol_type = other DNA
gctcaaatctgtaatcccagtactttgggaggctgaggtgggtggatcac

SEQ ID NO: 1499 - DNA, 50 bp, synthetic construct
  source 1..50: mol_type = other DNA
ctgaggtcaggagttcgagaccagcatggccaacatggtgaaaccccatc

SEQ ID NO: 1500 - DNA, 50 bp, synthetic construct
  source 1..50: mol_type = other DNA
tctactaaaaatacaaaaattagccaggcatggtggcatgcacctttaat

SEQ ID NO: 1501 - DNA, 50 bp, synthetic construct
  source 1..50: mol_type = other DNA
cccagctactcaggaggctgaggcaggagaatcacttgaacccaggaggc

SEQ ID NO: 1502 - DNA, 50 bp, synthetic construct
  source 1..50: mol_type = other DNA
agaggttgcagtcagccaagattatgccactgcactccagcctgggtggt

SEQ ID NO: 1503 - DNA, 50 bp, synthetic construct
  source 1..50: mol_type = other DNA
aaagtgagactgtctcacaaaaaaaaaaaaaaaaaaaaaaaaaaagagag

SEQ ID NO: 1504 - DNA, 30 bp, synthetic construct
  source 1..30: mol_type = other DNA
cagtattctatttcttgaccacagagggtg

SEQ ID NO: 1505 - DNA, 50 bp, synthetic construct
  source 1..50: mol_type = other DNA
gtgtggtggctcacagcagtaatcctaacactttgggaggccaaggcagg

SEQ ID NO: 1506 - DNA, 50 bp, synthetic construct
  source 1..50: mol_type = other DNA
aagatgtcttgagcccaggagttcgagatcggcctgggcaacacagtgag

SEQ ID NO: 1507 - DNA, 50 bp, synthetic construct
  source 1..50: mol_type = other DNA
accccatctctacaaaaaatttttttataaaaagtagccaggcatggtgg

SEQ ID NO: 1508 - DNA, 50 bp, synthetic construct
  source 1..50: mol_type = other DNA
tgcacgcctgtagtcccagctgctcggtaggctgaggtgggaggatagct

SEQ ID NO: 1509 - DNA, 50 bp, synthetic construct
  source 1..50: mol_type = other DNA
tgagcccaagaggtcaaggctgcagtgagccatgattgcgccactgcact

SEQ ID NO: 1510 - DNA, 40 bp, synthetic construct
  source 1..40: mol_type = other DNA
ccagactgggtgacagagtgagaccctgtctcaaaaaaaa

SEQ ID NO: 1511 - DNA, 50 bp, synthetic construct
  source 1..50: mol_type = other DNA
ggctgggcgcagtggctcatatctgtaatcccagcactttgtggggccta

SEQ ID NO: 1512 - DNA, 50 bp, synthetic construct
  source 1..50: mol_type = other DNA
ggcggctggattgcttgaacccaggagttccagaccagcctgggcaacat

SEQ ID NO: 1513 - DNA, 50 bp, synthetic construct
  source 1..50: mol_type = other DNA
ggcaaaacctcatctctacaaaaaatacaaaaaaaaaaaaaaattagcta

SEQ ID NO: 1514 - DNA, 50 bp, synthetic construct
  source 1..50: mol_type = other DNA
ggtgtggtggcatgcacttgtagttccagctactcaggaggaggatagct

SEQ ID NO: 1515 - DNA, 50 bp, synthetic construct
  source 1..50: mol_type = other DNA
tgagcccaggaggtcgaggctgcagtgagccatgattgcgccactgcact

SEQ ID NO: 1516 - DNA, 20 bp, synthetic construct
  source 1..20: mol_type = other DNA
cagcctgggtgacagagtga

SEQ ID NO: 1517 - DNA, 50 bp, synthetic construct; identical to SEQ ID NO: 516
  source 1..50: mol_type = other DNA

SEQ ID NO: 1518 - DNA, 50 bp, synthetic construct
  source 1..50: mol_type = other DNA
ggcaggcagagcacgaggtcaggagatcgagaccatcctggctaacatgg

SEQ ID NO: 1519 - DNA, 50 bp, synthetic construct
  source 1..50: mol_type = other DNA
tgaaaccccatctctactaaaaatacaaaaaattagctgggtgtgttggt

SEQ ID NO: 1520 - DNA, 50 bp, synthetic construct
  source 1..50: mol_type = other DNA
gggcgcctgtagtcccagctactcaggaggctgaggcaggagaatggcgt

SEQ ID NO: 1521 - DNA, 50 bp, synthetic construct
  source 1..50: mol_type = other DNA
gaacccaggaggcagagcttgcagtgagccgagatcgtgccactgcactc

SEQ ID NO: 1522 - DNA, 50 bp, synthetic construct
  source 1..50: mol_type = other DNA
cagcctgggtgacagtgcaagaccccgtctcaaaataaaaaaaaaagaag

SEQ ID NO: 1523 - DNA, 50 bp, synthetic construct; identical to SEQ ID NO: 516
  source 1..50: mol_type = other DNA

SEQ ID NO: 1524 - DNA, 50 bp, synthetic construct; identical to SEQ ID NO: 517
  source 1..50: mol_type = other DNA

SEQ ID NO: 1525 - DNA, 50 bp, synthetic construct; identical to SEQ ID NO: 518
  source 1..50: mol_type = other DNA

SEQ ID NO: 1526 - DNA, 50 bp, synthetic construct; identical to SEQ ID NO: 519
  source 1..50: mol_type = other DNA

SEQ ID NO: 1527 - DNA, 50 bp, synthetic construct; identical to SEQ ID NO: 520
  source 1..50: mol_type = other DNA

SEQ ID NO: 1528 - DNA, 50 bp, synthetic construct; identical to SEQ ID NO: 521
  source 1..50: mol_type = other DNA

SEQ ID NO: 1529 - skipped

SEQ ID NO: 1530 - DNA, 50 bp, synthetic construct
  source 1..50: mol_type = other DNA
ggctcatagtcatcttttatttcagtgggcatttaaatcagccatatttg

SEQ ID NO: 1531 - DNA, 30 bp, synthetic construct
  source 1..30: mol_type = other DNA
gattgcagaatttcttaaaaagtcatcata

SEQ ID NO: 1532 - DNA, 30 bp, synthetic construct
  source 1..30: mol_type = other DNA
ttgtgttcagtctttatgggacaaattcca

SEQ ID NO: 1533 - DNA, 30 bp, synthetic construct
  source 1..30: mol_type = other DNA
tccagctgctcagcctcccggagccccacg

SEQ ID NO: 1534 - DNA, 30 bp, synthetic construct
  source 1..30: mol_type = other DNA
tcatgtgtgttcagtctttatggatttacc

SEQ ID NO: 1535 - DNA, 26 bp, synthetic construct
  source 1..26: mol_type = other DNA
attttttaaaaagtcattgtgttcca

SEQ ID NO: 1536 - DNA, 26 bp, synthetic construct
  source 1..26: mol_type = other DNA
cagaatttcttaaaaagccatttaaa

SEQ ID NO: 1537 - DNA, 98 bp, synthetic construct
  source 1..98: mol_type = other DNA
gctggagtgcagtggcatgatctcggctcactgcaacctccgcctcccgggttcaagtgattctcctgcctcagcctcccaaatagctgtgattacag

SEQ ID NO: 1538 - DNA, 50 bp, synthetic construct
  source 1..50: mol_type = other DNA
ggcagagcgaggtggctcacgcctgtaatcccagcactttgggaggccga

SEQ ID NO: 1539 - DNA, 50 bp, synthetic construct
  source 1..50: mol_type = other DNA
ggcaggcagatcacaaggtcaagagatcgagatcatcctggccaacatag

SEQ ID NO: 1540 - DNA, 50 bp, synthetic construct
  source 1..50: mol_type = other DNA
tgaaaccctgtctctactaaaaatacaaaacttagctgggcgtggtggca

SEQ ID NO: 1541 - DNA, 50 bp, synthetic construct
  source 1..50: mol_type = other DNA
catacctgtaatcacagctatttgggaggctgaggcaggagaatcacttg

SEQ ID NO: 1542 - DNA, 50 bp, synthetic construct
  source 1..50: mol_type = other DNA
aacccgggaggcggaggttgcagtgagccgagatcatgccactgcactcc

SEQ ID NO: 1543 - DNA, 50 bp, synthetic construct
  source 1..50: mol_type = other DNA
agcctggtgacagagtgagagtgcgtctcaaaaaaacaaaaaacaaaaaa

SEQ ID NO: 1544 - skipped

SEQ ID NO: 1545 - DNA, 50 bp, synthetic construct
  source 1..50: mol_type = other DNA
ggccgggcgcggtggctcactcctgtaatcccaacgctttgggaggccga

SEQ ID NO: 1546 - DNA, 50 bp, synthetic construct
  source 1..50: mol_type = other DNA
ggcgggcggatcacgaggtcaggagatggagaccatcctggctaacacgg

SEQ ID NO: 1547 - DNA, 50 bp, synthetic construct
  source 1..50: mol_type = other DNA
tgaaaccccgtctctactaaaactacaaaaaaattagccgggcgtggtag

SEQ ID NO: 1548 - DNA, 50 bp, synthetic construct
  source 1..50: mol_type = other DNA
cgggcgcctgtagtcctagctactccggacgctgagggaggctgaggcgg

SEQ ID NO: 1549 - DNA, 50 bp, synthetic construct
  source 1..50: mol_type = other DNA
gagaatggcgtgaacccgggaggcggagcttgcagtgagctgagatcgcg

SEQ ID NO: 1550 - DNA, 50 bp, synthetic construct
  source 1..50: mol_type = other DNA
ccactgcactccagcctgggcgagagagattccgcctcaaaaaaaaaaaa

SEQ ID NO: 1551 - DNA, 12 bp, synthetic construct
  source 1..12: mol_type = other DNA
aaaaaaaaaaaa

SEQ ID NO: 1552 - DNA, 50 bp, synthetic construct
  source 1..50: mol_type = other DNA
tataccacattttctgggctcccttgcaggtcacagtgtccatgtaacta

SEQ ID NO: 1553 - DNA, 50 bp, synthetic construct
  source 1..50: mol_type = other DNA
actcctggttaagaggatatggatagaaggcacatgttcaacttctggct

SEQ ID NO: 1554 - DNA, 50 bp, synthetic construct
  source 1..50: mol_type = other DNA
tctgtccttgaaaagtgtgatgattccatcctttgctgtcttccttcccg

SEQ ID NO: 1555 - DNA, 50 bp, synthetic construct
  source 1..50: mol_type = other DNA
ctgactggaatgtggacttggtagtgagctaccttggactatgtggatga

SEQ ID NO: 1556 - DNA, 50 bp, synthetic construct
  source 1..50: mol_type = other DNA
agacaaagataaaaggaaccaaggactctgatgattctgtagagaagagg

SEQ ID NO: 1557 - DNA, 50 bp, synthetic construct
  source 1..50: mol_type = other DNA
aaccgtagctgctcaaacgttcatgtgaaagaagaataaactatcagatt

SEQ ID NO: 1558 - DNA, 20 bp, synthetic construct
  source 1..20: mol_type = other DNA
taagccactgctattttggg

SEQ ID NO: 1559 - DNA, 50 bp, synthetic construct
  source 1..50: mol_type = other DNA
accttgtttcttacttgagaaagttacagtcatccatcaattgtccaccc

SEQ ID NO: 1560 - DNA, 50 bp, synthetic construct
  source 1..50: mol_type = other DNA; mol_type = other DNA
tgcccagcacttactaatatatagacactttcttaactcctttccacata

SEQ ID NO: 1561 - DNA, 50 bp, synthetic construct
  source 1..50: mol_type = other DNA; mol_type = other DNA
tttggaggatgatgtgtccttctagcacaaagccaagccctctcctggag

SEQ ID NO: 1562 - DNA, 50 bp, synthetic construct
  source 1..50: mol_type = other DNA; mol_type = other DNA
cccttgattccatttctttcctccccatctccattcctggaatgttgctt

SEQ ID NO: 1563 - DNA, 50 bp, synthetic construct
  source 1..50: mol_type = other DNA; mol_type = other DNA
catcagtcattcccactctgttcttatcttccaccttagcccttctgttg

SEQ ID NO: 1564 - DNA, 50 bp, synthetic construct
  source 1..50: mol_type = other DNA; mol_type = other DNA
gctccaatcctgagtccatacaccccaaatctttctcatccttaaaaaat

SEQ ID NO: 1565 - skipped

SEQ ID NO: 1566 - DNA, 50 bp, synthetic construct
  source 1..50: mol_type = other DNA; mol_type = other DNA
ctggagtgcagtggcatgatctcggctcactacaacctccacctcctggg

SEQ ID NO: 1567 - DNA, 50 bp, synthetic construct
  source 1..50: mol_type = other DNA; mol_type = other DNA
ttccagcgattctcctgcctcagcctcccaaatagctgtgattacaggcg

SEQ ID NO: 1568 - DNA, 50 bp, synthetic construct
  source 1..50: mol_type = other DNA; mol_type = other DNA
gctggagtacagtggcataatctcggctcactgcaacctccgtctcccag

SEQ ID NO: 1569 - DNA, 50 bp, synthetic construct
  source 1..50: mol_type = other DNA; mol_type = other DNA
gttcaagtgattcttctgcctcagcctcccaaatagctgggattacaggc

SEQ ID NO: 1570 - DNA, 50 bp, synthetic construct
  source 1..50: mol_type = other DNA; mol_type = other DNA
gctggagtacaatggcacaatctcagctcaccgcaacctccgcctcccgg

SEQ ID NO: 1571 - DNA, 50 bp, synthetic construct
  source 1..50: mol_type = other DNA; mol_type = other DNA
gttcaagtgattctcctgcctcagcctcccaaatagctgtgattacaggt

SEQ ID NO: 1572 - DNA, 96 bp, synthetic construct
  source 1..96: mol_type = other DNA; mol_type = other DNA
tggagtgcaatggcatgatctcggctcactgcaacctccgcctcccaggttcaagtgattctcctgcctcagcctcccaaatagctgggattacag

SEQ ID NO: 1573 - DNA, 97 bp, synthetic construct
  source 1..97: mol_type = other DNA; mol_type = other DNA
gctggagtgcagtggcacgatcttggctcactgcaacctctgcctcccgtgttcaagtgattctcctgcctcagcctcgcaaatagctggactacag

SEQ ID NO: 1574 - DNA, 60 bp, synthetic construct
  source 1..60: mol_type = other DNA; mol_type = other DNA
gctggagtgcagtggtgtgatctcggttcactacaacctccgcctcctgggttcaagcga

SEQ ID NO: 1575 - DNA, 50 bp, synthetic construct
  source 1..50: mol_type = other DNA; mol_type = other DNA
gtggctcacgtctgtaatcccagcactttgggaggccgaggcgggcggat

SEQ ID NO: 1576 - DNA, 50 bp, synthetic construct
  source 1..50: mol_type = other DNA; mol_type = other DNA
cacaaggtcaagagatcgagaccattctggccaacatggtgaaaccccat

SEQ ID NO: 1577 - DNA, 50 bp, synthetic construct
  source 1..50: mol_type = other DNA; mol_type = other DNA
ctctactaaaagtacaaaaattagctgggcgtggtggcaggcgcctgtaa

SEQ ID NO: 1578 - DNA, 50 bp, synthetic construct
  source 1..50: mol_type = other DNA; mol_type = other DNA
tcccagctactcgggaggctgaggcaggagaatcacttgaacccaggagg

SEQ ID NO: 1579 - DNA, 50 bp, synthetic construct
  source 1..50: mol_type = other DNA; mol_type = other DNA
cagaggttgcagtgagccaagatcatgccactgcactccagcctggtgac

SEQ ID NO: 1580 - DNA, 50 bp, synthetic construct
  source 1..50: mol_type = other DNA; mol_type = other DNA
agagcgagactccgtctcaaaaaaacaaaaacaaaaacaaaaacaaaaac

SEQ ID NO: 1581 - DNA, 50 bp, synthetic construct
  source 1..50: mol_type = other DNA; mol_type = other DNA
gtggttcacgcctgtaatcccagcactttgggaggccgaggagggcagat

SEQ ID NO: 1582 - DNA, 50 bp, synthetic construct
  source 1..50: mol_type = other DNA; mol_type = other DNA
cacaaggtcaagagatggagaacatcctggccaacatagtgaaaccccgt

SEQ ID NO: 1583 - DNA, 50 bp, synthetic construct
  source 1..50: mol_type = other DNA; mol_type = other DNA
ctctactaaaaatacaaaacttagctgggcatggtggcgcacacctgtag

SEQ ID NO: 1584 - DNA, 50 bp, synthetic construct
  source 1..50: mol_type = other DNA; mol_type = other DNA
tcccagctactcgggaggctgaggcaggagaattgcttgaacctgggagg

SEQ ID NO: 1585 - DNA, 50 bp, synthetic construct
  source 1..50: mol_type = other DNA; mol_type = other DNA
cggaggttgcagtgagccaagatcacgccactgcactccagcctggcgac

SEQ ID NO: 1586 - DNA, 50 bp, synthetic construct
  source 1..50: mol_type = other DNA; mol_type = other DNA
agagtgagagtccgtctcagaaaaaaaaaaaaaaaaagagacaggatttc

SEQ ID NO: 1587 - DNA, 50 bp, synthetic construct
  source 1..50: mol_type = other DNA; mol_type = other DNA
gtggttcacgcctgtaatcccagcactttgggaggccaaggcggtcagat

SEQ ID NO: 1588 - DNA, 50 bp, synthetic construct
  source 1..50: mol_type = other DNA; mol_type = other DNA
cacacagtcaagagatcgagaccatcctggccaacatggtgaaaccccgt

SEQ ID NO: 1589 - DNA, 50 bp, synthetic construct
  source 1..50: mol_type = other DNA; mol_type = other DNA
ttctactaaaaatgcaaaacttagctgggcatagtggcatgcacctgtag

SEQ ID NO: 1590 - DNA, 50 bp, synthetic construct
  source 1..50: mol_type = other DNA; mol_type = other DNA
tcccagctatttgggaggctgaggcatgagaatcacttgaacctgggagg

SEQ ID NO: 1591 - DNA, 50 bp, synthetic construct
  source 1..50: mol_type = other DNA; mol_type = other DNA
gccgggcgcggtggctcacgcctgtaatcccagcactttgggaggccgag

SEQ ID NO: 1592 - DNA, 50 bp, synthetic construct
  source 1..50: mol_type = other DNA; mol_type = other DNA
gcgggcggatcacgaggtcaggagatggagaccatcctggctaacacggt

SEQ ID NO: 1593 - DNA, 50 bp, synthetic construct
  source 1..50: mol_type = other DNA; mol_type = other DNA
gaaaccccgtctctactaaaaatacaaaaaattagccgggcgtggtagcg

SEQ ID NO: 1594 - DNA, 50 bp, synthetic construct
  source 1..50: mol_type = other DNA; mol_type = other DNA
ggcgcctgtagtcccagctactcgggaggctgaggcaggagaatggcgtg

SEQ ID NO: 1595 - DNA, 50 bp, synthetic construct
  source 1..50: mol_type = other DNA; mol_type = other DNA
aacccgggaggcggagcttgcagtgagccgagatcgcgccactgcactcc

SEQ ID NO: 1596 - DNA, 50 bp, synthetic construct
  source 1..50: mol_type = other DNA; mol_type = other DNA
agcctgggcgacagagcgagactccgtctcaaaaaaaaaaaaaaaaaaaa

SEQ ID NO: 1597 - DNA, 10 bp, synthetic construct
  source 1..10: mol_type = other DNA; mol_type = other DNA
aaaaaaaaga

SEQ ID NO: 1598 - DNA, 50 bp, synthetic construct
  source 1..50: mol_type = other DNA; mol_type = other DNA
ggccgggtgcggtggctcacacctgtaatcccagcactttgggaggccga

SEQ ID NO: 1599 - DNA, 50 bp, synthetic construct; identical to SEQ ID NO: 517
  source 1..50: mol_type = other DNA; mol_type = other DNA

SEQ ID NO: 1600 - DNA, 50 bp, synthetic construct
  source 1..50: mol_type = other DNA; mol_type = other DNA
tgaaaccccgtctctactaaaactacaaaaaatagccgggcgtagtggcg

SEQ ID NO: 1601 - DNA, 50 bp, synthetic construct
  source 1..50: mol_type = other DNA; mol_type = other DNA
ggtgcctgtagtcctagctacttgggaggctgaggcaggagaatggcgtg

SEQ ID NO: 1602 - DNA, 50 bp, synthetic construct
  source 1..50: mol_type = other DNA; mol_type = other DNA
aacccgggaggcggagcttgcagtgagccgagatcccgccactgcactcc

SEQ ID NO: 1603 - DNA, 50 bp, synthetic construct; identical to SEQ ID NO: 1596
  source 1..50: mol_type = other DNA; mol_type = other DNA

SEQ ID NO: 1604 - DNA, 10 bp, synthetic construct
  source 1..10: mol_type = other DNA; mol_type = other DNA
aatagcttag

SEQ ID NO: 1605 - DNA, 40 bp, synthetic construct
  source 1..40: mol_type = other DNA; mol_type = other DNA
cttctgtccttccttcctcctttgctgtcttccttctgtc

SEQ ID NO: 1606 - DNA, 50 bp, synthetic construct
  source 1..50: mol_type = other DNA; mol_type = other DNA
agaagaataaactcttgttattttaagccactgctagttgggttctctgt

SEQ ID NO: 1607 - DNA, 50 bp, synthetic construct
  source 1..50: mol_type = other DNA; mol_type = other DNA
aagacaaagataaaaggatgtggaagtaagaaatgaagttacaaaacagt

SEQ ID NO: 1608 - DNA, 50 bp, synthetic construct
  source 1..50: mol_type = other DNA; mol_type = other DNA
tgacagtactttctcttctcacagatttttcccaggagacccttttacat

SEQ ID NO: 1609 - DNA, 40 bp, synthetic construct
  source 1..40: mol_type = other DNA; mol_type = other DNA
aggtgtaaacaaatgttgttgtctctgatgatttattgca

SEQ ID NO: 1610 - DNA, 20 bp, synthetic construct
  source 1..20: mol_type = other DNA; mol_type = other DNA
cctttgctgtcttccttccc

SEQ ID NO: 1611 - DNA, 20 bp, synthetic construct
  source 1..20: mol_type = other DNA; mol_type = other DNA
ctagcacaaagccaagcacc

SEQ ID NO: 1612 - DNA, 30 bp, synthetic construct
  source 1..30: mol_type = other DNA; mol_type = other DNA
tgcttcatcagtcattccctctctctcctg

SEQ ID NO: 1613 - DNA, 30 bp, synthetic construct
  source 1..30: mol_type = other DNA; mol_type = other DNA
tgtccaccctgcccagcacctactcccacc

SEQ ID NO: 1614 - DNA, 50 bp, synthetic construct
  source 1..50: mol_type = other DNA; mol_type = other DNA
tgtggggaaaagcaagagagatcagattgttactgtgtctgtatagaaag

SEQ ID NO: 1615 - DNA, 50 bp, synthetic construct
  source 1..50: mol_type = other DNA
aagtagacataggagactccattttgttctgtactaagaaaaattcttct

SEQ ID NO: 1616 - DNA, 50 bp, synthetic construct
  source 1..50: mol_type = other DNA
gccttgagattctgttaatctatgaccttacccccaaccccgtgctctct

SEQ ID NO: 1617 - DNA, 50 bp, synthetic construct
  source 1..50: mol_type = other DNA; mol_type = other DNA
gaaacatgtgctgtgtcaaactcagggttaaatggattaagggttgtgca

SEQ ID NO: 1618 - DNA, 50 bp, synthetic construct
  source 1..50: mol_type = other DNA; mol_type = other DNA
aggtgtgctttgttaaacagatgcttgaaggcagcatgctcgttaagagt

SEQ ID NO: 1619 - DNA, 50 bp, synthetic construct
  source 1..50: mol_type = other DNA; mol_type = other DNA
catcaccactccctaatctcaagtacccagggacacaaacactgcggaag

SEQ ID NO: 1620 - DNA, 50 bp, synthetic construct
  source 1..50: mol_type = other DNA; mol_type = other DNA
gccgcagggacctctgtctaggaaagccaggtattgtccaaggtttctcc

SEQ ID NO: 1621 - DNA, 50 bp, synthetic construct
  source 1..50: mol_type = other DNA; mol_type = other DNA
ccatgtgatagtctgaaatatggcctcgtgggaagggaaagacctgaccg

SEQ ID NO: 1622 - DNA, 50 bp, synthetic construct
  source 1..50: mol_type = other DNA; mol_type = other DNA
tcccccagcccgacacccgtaaagggtctgtgctgaggaggattagtata

SEQ ID NO: 1623 - DNA, 50 bp, synthetic construct
  source 1..50: mol_type = other DNA; mol_type = other DNA
agaggaaggaatgcctcttgcagttgagacaagaggaaggcatctgtctc

SEQ ID NO: 1624 - DNA, 50 bp, synthetic construct
  source 1..50: mol_type = other DNA; mol_type = other DNA
ctgcccgtccctgggcaatggaatgtctcggtataaaacccgattgtacg

SEQ ID NO: 1625 - DNA, 50 bp, synthetic construct
  source 1..50: mol_type = other DNA; mol_type = other DNA
ttccatctactgagatagggaaaaaccgccttagggctggaggtgggaca

SEQ ID NO: 1626 - DNA, 50 bp, synthetic construct
  source 1..50: mol_type = other DNA; mol_type = other DNA
tgcaggcagcaatactgctttgtaaagcattgagatgtttatgtgtatac

SEQ ID NO: 1627 - DNA, 50 bp, synthetic construct
  source 1..50: mol_type = other DNA; mol_type = other DNA
atatctaaaagcacagcacttaatcctttaccttgtctatgatgcaaaga

SEQ ID NO: 1628 - DNA, 50 bp, synthetic construct
  source 1..50: mol_type = other DNA; mol_type = other DNA
cctttgtttgtctgctgaccctctccccactattgtcttgtgaccatgac

SEQ ID NO: 1629 - DNA, 50 bp, synthetic construct
  source 1..50: mol_type = other DNA; mol_type = other DNA
acatccccctctcagagaaacacccatgaatgatcaataaatactaaggg

SEQ ID NO: 1630 - DNA, 50 bp, synthetic construct
  source 1..50: mol_type = other DNA; mol_type = other DNA
aactcagaggctggcgggatcctccatatgctgaatgctggttcctcgag

SEQ ID NO: 1631 - DNA, 50 bp, synthetic construct
  source 1..50: mol_type = other DNA; mol_type = other DNA
tcctttctctatactttgtctctgtgtctttttcttttccaagtctctca

SEQ ID NO: 1632 - DNA, 50 bp, synthetic construct
  source 1..50: mol_type = other DNA; mol_type = other DNA
ttccacctcacgagaaacacccacaggtgtggaggggcaacccacccctt

SEQ ID NO: 1633 - skipped

SEQ ID NO: 1634 - DNA, 50 bp, synthetic construct
  source 1..50: mol_type = other DNA; mol_type = other DNA
tgtggggaaaagcaagagagatcagattgttactgtgtctgtgtagaaag

SEQ ID NO: 1635 - DNA, 50 bp, synthetic construct; identical to SEQ ID NO: 1615
  source 1..50: mol_type = other DNA; mol_type = other DNA

SEQ ID NO: 1636 - DNA, 50 bp, synthetic construct
  source 1..50: mol_type = other DNA; mol_type = other DNA
gccttgagatgctgttaatctatgaccttacccccaaccccgtgctctct

SEQ ID NO: 1637 - DNA, 50 bp, synthetic construct
  source 1..50: mol_type = other DNA; mol_type = other DNA
gaaacatgtgctgtgtcaactcagggttaaatggattaagggtggtgcaa

SEQ ID NO: 1638 - DNA, 50 bp, synthetic construct
  source 1..50: mol_type = other DNA; mol_type = other DNA
gatgtgctttgttaaacagatgcttgaaggcagcatgctccttaagagtc

SEQ ID NO: 1639 - DNA, 50 bp, synthetic construct
  source 1..50: mol_type = other DNA; mol_type = other DNA
atcaccactccctaatctcaagtacccagggacacaaacactgcggaagg

SEQ ID NO: 1640 - DNA, 50 bp, synthetic construct
  source 1..50: mol_type = other DNA; mol_type = other DNA
ccgcagggacctctgcctaggaaagccaggtattgtccaaggtttctccc

SEQ ID NO: 1641 - DNA, 50 bp, synthetic construct
  source 1..50: mol_type = other DNA; mol_type = other DNA
catgtgatagtctgaaatatggcctcgtgggaagggaaagacctgaccgt

SEQ ID NO: 1642 - DNA, 50 bp, synthetic construct
  source 1..50: mol_type = other DNA; mol_type = other DNA
cccccagccggacacccgtaaagggtcagtgctgaggaggattagtataa

SEQ ID NO: 1643 - DNA, 50 bp, synthetic construct
  source 1..50: mol_type = other DNA; mol_type = other DNA
gaggaaggcatgcctcttgcagttgagacaagaggaaggcatctgtctcc

SEQ ID NO: 1644 - DNA, 50 bp, synthetic construct
  source 1..50: mol_type = other DNA; mol_type = other DNA
tgcccgtccctgggcaatggaatgtctcggtataaaacccgattgtacgt

SEQ ID NO: 1645 - DNA, 50 bp, synthetic construct
  source 1..50: mol_type = other DNA; mol_type = other DNA
tccatctactgagacagggaaaaaccgccttagggctggaggtgggacat

SEQ ID NO: 1646 - DNA, 50 bp, synthetic construct
  source 1..50: mol_type = other DNA; mol_type = other DNA
gcgggcagcaatactgctttgtaaagcattgagatgtttgtgtgtatgca

SEQ ID NO: 1647 - DNA, 50 bp, synthetic construct
  source 1..50: mol_type = other DNA; mol_type = other DNA
tatctaaaagcacagcacttaatcctttaccttgtctatgatgcaaagac

SEQ ID NO: 1648 - DNA, 50 bp, synthetic construct
  source 1..50: mol_type = other DNA
ctttgttcacatgtttgtctgctgaccctctccccactattgtcttgtga

SEQ ID NO: 1649 - DNA, 50 bp, synthetic construct
  source 1..50: mol_type = other DNA; mol_type = other DNA
ccatgacacatccccctctcggagaaacacccacccacgaatgatcaata

SEQ ID NO: 1650 - DNA, 50 bp, synthetic construct
  source 1..50: mol_type = other DNA; mol_type = other DNA
aatactaagggaactcagaggctggcgggatcctccatatgctgaacgct

SEQ ID NO: 1651 - DNA, 50 bp, synthetic construct
  source 1..50: mol_type = other DNA; mol_type = other DNA
ggttccccgggtccccttatttctttctctatactttgtctctgtgtctt

SEQ ID NO: 1652 - DNA, 50 bp, synthetic construct
  source 1..50: mol_type = other DNA; mol_type = other DNA
tttcttttccaagtctctcgttccacctcacgagaaacacccacaggtgt

SEQ ID NO: 1653 - DNA, 25 bp, synthetic construct
  source 1..25: mol_type = other DNA
ggaggggcaacccatcccttcacat

SEQ ID NO: 1654 - DNA, 50 bp, synthetic construct
  source 1..50: mol_type = other DNA
tgcggggaaaagcaagagagatcagattgttactgtgtctgtatagaaag

SEQ ID NO: 1655 - DNA, 50 bp, synthetic construct; identical to SEQ ID NO: 1615
  source 1..50: mol_type = other DNA; mol_type = other DNA

SEQ ID NO: 1656 - DNA, 50 bp, synthetic construct
  source 1..50: mol_type = other DNA; mol_type = other DNA
gccttgggatgctgttaatctataaccttacccccaaccccgtgctctct

SEQ ID NO: 1657 - DNA, 50 bp, synthetic construct
  source 1..50: mol_type = other DNA; mol_type = other DNA
gaaacatgtgctgtgtcaaactcagggttaaatggattaagggcggtgca

SEQ ID NO: 1658 - DNA, 50 bp, synthetic construct
  source 1..50: mol_type = other DNA; mol_type = other DNA
agatgtgctttgttaaacagatgcttgaaggcagcatgctccttaagagt

SEQ ID NO: 1659 - DNA, 50 bp, synthetic construct
  source 1..50: mol_type = other DNA; mol_type = other DNA
catcaccactccctaatctcaagtacccagggacacaaaaactgcggaag

SEQ ID NO: 1660 - DNA, 50 bp, synthetic construct
  source 1..50: mol_type = other DNA; mol_type = other DNA
gccgcagggacctctgcctaggaaagccaggtattgtccaaggtttctcc

SEQ ID NO: 1661 - DNA, 50 bp, synthetic construct; identical to SEQ ID NO: 1621
  source 1..50: mol_type = other DNA; mol_type = other DNA

SEQ ID NO: 1662 - DNA, 50 bp, synthetic construct
  source 1..50: mol_type = other DNA; mol_type = other DNA
tcccccagcccgacacccgtaaagggtctgtgctgaggaggattagtaaa

SEQ ID NO: 1663 - DNA, 50 bp, synthetic construct; identical to SEQ ID NO: 1623
  source 1..50: mol_type = other DNA; mol_type = other DNA

SEQ ID NO: 1664 - DNA, 50 bp, synthetic construct; identical to SEQ ID NO: 1624
  source 1..50: mol_type = other DNA; mol_type = other DNA

SEQ ID NO: 1665 - DNA, 50 bp, synthetic construct; identical to SEQ ID NO: 1625
  source 1..50: mol_type = other DNA; mol_type = other DNA

SEQ ID NO: 1666 - DNA, 50 bp, synthetic construct
  source 1..50: mol_type = other DNA; mol_type = other DNA
tgcgggcagcaatactgctttgtaaagcattgagatgtttatgtgtatgc

SEQ ID NO: 1667 - DNA, 50 bp, synthetic construct; identical to SEQ ID NO: 1627
  source 1..50: mol_type = other DNA; mol_type = other DNA

SEQ ID NO: 1668 - DNA, 50 bp, synthetic construct
  source 1..50: mol_type = other DNA; mol_type = other DNA
tctttgttcacgtgtttgtctgctgaccctctccccactattgtcttgtg

SEQ ID NO: 1669 - DNA, 50 bp, synthetic construct
  source 1..50: mol_type = other DNA; mol_type = other DNA
accctgacacatccccctctcggagaaacacccacgaatgatcaataaat

SEQ ID NO: 1670 - DNA, 50 bp, synthetic construct
  source 1..50: mol_type = other DNA; mol_type = other DNA
actaagggaactcagaggctggcgggatcctccatatgctgaacgctggt

SEQ ID NO: 1671 - DNA, 50 bp, synthetic construct
  source 1..50: mol_type = other DNA; mol_type = other DNA
tccccgggcccccttatttctttctctatactttgtctctgtgtcttttt

SEQ ID NO: 1672 - DNA, 50 bp, synthetic construct
  source 1..50: mol_type = other DNA; mol_type = other DNA
cttttccaagtctctcgttccacctaacgagaaacacccacaggtgtgga

SEQ ID NO: 1673 - DNA, 20 bp, synthetic construct
  source 1..20: mol_type = other DNA; mol_type = other DNA
ggggcaacccaccccttcaa

SEQ ID NO: 1674 - DNA, 50 bp, synthetic construct; identical to SEQ ID NO: 1614
  source 1..50: mol_type = other DNA; mol_type = other DNA

SEQ ID NO: 1675 - DNA, 50 bp, synthetic construct; identical to SEQ ID NO: 1615
  source 1..50: mol_type = other DNA; mol_type = other DNA

SEQ ID NO: 1676 - DNA, 50 bp, synthetic construct; identical to SEQ ID NO: 1636
  source 1..50: mol_type = other DNA; mol_type = other DNA

SEQ ID NO: 1677 - DNA, 50 bp, synthetic construct; identical to SEQ ID NO: 1617
  source 1..50: mol_type = other DNA; mol_type = other DNA

SEQ ID NO: 1678 - DNA, 50 bp, synthetic construct
  source 1..50: mol_type = other DNA; mol_type = other DNA
agatgtgctttgttaaacaaatgcttgaaggcagcatgctctttaagagt

SEQ ID NO: 1679 - DNA, 50 bp, synthetic construct; identical to SEQ ID NO: 1619
  source 1..50: mol_type = other DNA; mol_type = other DNA

SEQ ID NO: 1680 - DNA, 50 bp, synthetic construct; identical to SEQ ID NO: 1660
  source 1..50: mol_type = other DNA; mol_type = other DNA

SEQ ID NO: 1681 - DNA, 50 bp, synthetic construct; identical to SEQ ID NO: 1621
  source 1..50: mol_type = other DNA; mol_type = other DNA

SEQ ID NO: 1682 - DNA, 50 bp, synthetic construct
  source 1..50: mol_type = other DNA; mol_type = other DNA
tcccccagcccgacacccataaagggtctgtgtgaggaggattagtataa

SEQ ID NO: 1683 - DNA, 50 bp, synthetic construct
  source 1..50: mol_type = other DNA; mol_type = other DNA
gaggaaggcatgcctcttgcagttgagacaagaggaaggcgtctgtctcc

SEQ ID NO: 1684 - DNA, 50 bp, synthetic construct
  source 1..50: mol_type = other DNA; mol_type = other DNA
tgcccgtccctggacaatggaatgtctcggtataaaacccgattgtacgt

SEQ ID NO: 1685 - DNA, 50 bp, synthetic construct
  source 1..50: mol_type = other DNA; mol_type = other DNA
tccatctactgagatagggaaaaacgccttagggctggaggtgggacatg

SEQ ID NO: 1686 - DNA, 50 bp, synthetic construct
  source 1..50: mol_type = other DNA; mol_type = other DNA
cgggcagcaatactgctttgtaaagcattgagatgtttatgtgtatgcat

SEQ ID NO: 1687 - DNA, 50 bp, synthetic construct
  source 1..50: mol_type = other DNA; mol_type = other DNA
atctaagagcacagcacttaatcctttacctcgtctatgatgcaaagacc

SEQ ID NO: 1688 - DNA, 50 bp, synthetic construct
  source 1..50: mol_type = other DNA; mol_type = other DNA
tttgttcacgtgtttgtctgctgaccctctccccactattgtcttgtgac

SEQ ID NO: 1689 - DNA, 50 bp, synthetic construct
  source 1..50: mol_type = other DNA; mol_type = other DNA
cctgacacatccccctctcggagaaacacccacgaatgatcaataaatac

SEQ ID NO: 1690 - DNA, 50 bp, synthetic construct
  source 1..50: mol_type = other DNA; mol_type = other DNA
taagggaactcagaggctggcgggatcctccatatgctgaacgctggttc

SEQ ID NO: 1691 - DNA, 50 bp, synthetic construct
  source 1..50: mol_type = other DNA; mol_type = other DNA
cccgggtccccttatttctttctctatactttgtctctgtgtctttttct

SEQ ID NO: 1692 - DNA, 50 bp, synthetic construct
  source 1..50: mol_type = other DNA; mol_type = other DNA
tttccaagtctctcgttccaccttacgagaaacacccacaggtgtggagg

SEQ ID NO: 1693 - DNA, 20 bp, synthetic construct
  source 1..20: mol_type = other DNA; mol_type = other DNA
ggcaacccaccccttcaagc

SEQ ID NO: 1694 - DNA, 50 bp, synthetic construct; identical to SEQ ID NO: 1614
  source 1..50: mol_type = other DNA; mol_type = other DNA

SEQ ID NO: 1695 - DNA, 50 bp, synthetic construct; identical to SEQ ID NO: 1615
  source 1..50: mol_type = other DNA; mol_type = other DNA

SEQ ID NO: 1696 - DNA, 50 bp, synthetic construct
  source 1..50: mol_type = other DNA; mol_type = other DNA
gccttgagattctgttaatctatgaccttatccccaaccccgtgctctct

SEQ ID NO: 1697 - DNA, 50 bp, synthetic construct
  source 1..50: mol_type = other DNA; mol_type = other DNA
gaaacatgcgctgtgtcaactcagggtgaaatggattaagggttgtgcag

SEQ ID NO: 1698 - DNA, 50 bp, synthetic construct
  source 1..50: mol_type = other DNA; mol_type = other DNA
gatgtgctttgttaaacaaatgcttgaaggcagcatgctccttaagagtc

SEQ ID NO: 1699 - DNA, 50 bp, synthetic construct; identical to SEQ ID NO: 1639
  source 1..50: mol_type = other DNA; mol_type = other DNA

SEQ ID NO: 1700 - DNA, 50 bp, synthetic construct; identical to SEQ ID NO: 1640
  source 1..50: mol_type = other DNA; mol_type = other DNA

SEQ ID NO: 1701 - DNA, 50 bp, synthetic construct; identical to SEQ ID NO: 1641
  source 1..50: mol_type = other DNA; mol_type = other DNA

SEQ ID NO: 1702 - DNA, 50 bp, synthetic construct
  source 1..50: mol_type = other DNA; mol_type = other DNA
cccccagcccgacacccgtaaagggtctgtgctgaggaggattagtataa

SEQ ID NO: 1703 - DNA, 50 bp, synthetic construct; identical to SEQ ID NO: 1643
  source 1..50: mol_type = other DNA; mol_type = other DNA

SEQ ID NO: 1704 - DNA, 50 bp, synthetic construct
  source 1..50: mol_type = other DNA; mol_type = other DNA
tgcccctccctgggcaatggaatgtctcggtataaaacccgattgtacgt

SEQ ID NO: 1705 - DNA, 50 bp, synthetic construct
  source 1..50: mol_type = other DNA; mol_type = other DNA
tccatctactgagatagggaaaaaccgccttagggctggaggtgggacat

SEQ ID NO: 1706 - DNA, 50 bp, synthetic construct
  source 1..50: mol_type = other DNA; mol_type = other DNA
gcgggcagcaatactgctttgtaaagcattgagatgtttatgtgtatgca

SEQ ID NO: 1707 - DNA, 50 bp, synthetic construct; identical to SEQ ID NO: 1647
  source 1..50: mol_type = other DNA; mol_type = other DNA

SEQ ID NO: 1708 - DNA, 50 bp, synthetic construct
  source 1..50: mol_type = other DNA; mol_type = other DNA
ctttgttaacgtgtttgtctgctgaccctctccccactattgtcttgtga

SEQ ID NO: 1709 - DNA, 50 bp, synthetic construct
  source 1..50: mol_type = other DNA; mol_type = other DNA
ccctgacacatccccctctcagagaaacacccacaaatgatgaataaata

SEQ ID NO: 1710 - DNA, 50 bp, synthetic construct
  source 1..50: mol_type = other DNA; mol_type = other DNA
ttaagggaactcagaggctggcgggatcctccatatgctgaacgctggtt

SEQ ID NO: 1711 - DNA, 50 bp, synthetic construct
  source 1..50: mol_type = other DNA; mol_type = other DNA
ccccgggtccccttatttctttctctatactttgtctctgtgtctttttc

SEQ ID NO: 1712 - DNA, 50 bp, synthetic construct
  source 1..50: mol_type = other DNA; mol_type = other DNA
ttttccaagtctctcgttccaccttacgagaaacacccacaggtgtggag

SEQ ID NO: 1713 - DNA, 20 bp, synthetic construct
  source 1..20: mol_type = other DNA; mol_type = other DNA
gggcaacccaccccttcaca

SEQ ID NO: 1714 - DNA, 50 bp, synthetic construct; identical to SEQ ID NO: 1614
  source 1..50: mol_type = other DNA; mol_type = other DNA

SEQ ID NO: 1715 - DNA, 50 bp, synthetic construct; identical to SEQ ID NO: 1615
  source 1..50: mol_type = other DNA; mol_type = other DNA

SEQ ID NO: 1716 - DNA, 50 bp, synthetic construct
  source 1..50: mol_type = other DNA; mol_type = other DNA
gccttgagattctgttaatctatgaccttacccccaaccctgtgctctct

SEQ ID NO: 1717 - DNA, 50 bp, synthetic construct
  source 1..50: mol_type = other DNA; mol_type = other DNA
gaaacatgtgctgagtcaactcagggttaaatgaattaagggctgtgcaa

SEQ ID NO: 1718 - DNA, 50 bp, synthetic construct
  source 1..50: mol_type = other DNA; mol_type = other DNA
gatgtgctttgttaaacagatgcttgaaggcagcatgctcgttaagagtc

SEQ ID NO: 1719 - DNA, 50 bp, synthetic construct
  source 1..50: mol_type = other DNA; mol_type = other DNA
atcaccactccctaatctcaagtacccagagacacaaaacactgcggaag

SEQ ID NO: 1720 - DNA, 50 bp, synthetic construct
  source 1..50: mol_type = other DNA; mol_type = other DNA
cccgcagggacctctgcctaggaaagccaggtattgtccaaggtttctcc

SEQ ID NO: 1721 - DNA, 50 bp, synthetic construct; identical to SEQ ID NO: 1621
  source 1..50: mol_type = other DNA; mol_type = other DNA

SEQ ID NO: 1722 - DNA, 50 bp, synthetic construct
  source 1..50: mol_type = other DNA; mol_type = other DNA
ttccccagcccgacacccgtaaagggtctgtgctgagaaggattagtata

SEQ ID NO: 1723 - DNA, 50 bp, synthetic construct
  source 1..50: mol_type = other DNA; mol_type = other DNA
agaggaaggcatgcctcttgcagttgagacaagaggaaggcatctgtctc

SEQ ID NO: 1724 - DNA, 50 bp, synthetic construct
  source 1..50: mol_type = other DNA; mol_type = other DNA
ctccccgtccctgggcaatggaatgtctcggtataaaacccgattgtaca

SEQ ID NO: 1725 - DNA, 50 bp, synthetic construct; identical to SEQ ID NO: 1625
  source 1..50: mol_type = other DNA; mol_type = other DNA

SEQ ID NO: 1726 - DNA, 50 bp, synthetic construct; identical to SEQ ID NO: 1666
  source 1..50: mol_type = other DNA; mol_type = other DNA

SEQ ID NO: 1727 - DNA, 50 bp, synthetic construct; identical to SEQ ID NO: 1627
  source 1..50: mol_type = other DNA; mol_type = other DNA

SEQ ID NO: 1728 - DNA, 50 bp, synthetic construct
  source 1..50: mol_type = other DNA; mol_type = other DNA
cctttgttcacgtgtttgtctgttgaccctctccccactattgtcttgtg

SEQ ID NO: 1729 - DNA, 50 bp, synthetic construct; identical to SEQ ID NO: 1669
  source 1..50: mol_type = other DNA; mol_type = other DNA

SEQ ID NO: 1730 - DNA, 50 bp, synthetic construct; identical to SEQ ID NO: 1670
  source 1..50: mol_type = other DNA; mol_type = other DNA

SEQ ID NO: 1731 - DNA, 50 bp, synthetic construct
  source 1..50: mol_type = other DNA; mol_type = other DNA
tcccctggtccccttatttctttctccatactttgtctctgtgtcttttt

SEQ ID NO: 1732 - DNA, 50 bp, synthetic construct
  source 1..50: mol_type = other DNA; mol_type = other DNA
cttttccaagtctctcattccaccttacgagaaacacccacaggtgtgga

SEQ ID NO: 1733 - DNA, 20 bp, synthetic construct
  source 1..20: mol_type = other DNA; mol_type = other DNA
ggggcaacccaccccttcat

SEQ ID NO: 1734 - DNA, 50 bp, synthetic construct; identical to SEQ ID NO: 1634
  source 1..50: mol_type = other DNA; mol_type = other DNA

SEQ ID NO: 1735 - DNA, 50 bp, synthetic construct; identical to SEQ ID NO: 1615
  source 1..50: mol_type = other DNA; mol_type = other DNA

SEQ ID NO: 1736 - DNA, 50 bp, synthetic construct; identical to SEQ ID NO: 1616
  source 1..50: mol_type = other DNA; mol_type = other DNA

SEQ ID NO: 1737 - DNA, 50 bp, synthetic construct
  source 1..50: mol_type = other DNA; mol_type = other DNA
gaaacaggtgctgtgtcaaactcagggttaaatggattaagggttgtgca

SEQ ID NO: 1738 - DNA, 50 bp, synthetic construct
  source 1..50: mol_type = other DNA; mol_type = other DNA
agatgtgctttgttaaacaaatgcttgaaggcagcatgctccttaagagt

SEQ ID NO: 1739 - DNA, 50 bp, synthetic construct; identical to SEQ ID NO: 1659
  source 1..50: mol_type = other DNA; mol_type = other DNA

SEQ ID NO: 1740 - DNA, 50 bp, synthetic construct; identical to SEQ ID NO: 1660
  source 1..50: mol_type = other DNA; mol_type = other DNA

SEQ ID NO: 1741 - DNA, 50 bp, synthetic construct
  source 1..50: mol_type = other DNA; mol_type = other DNA
ccatgtgatagtctgaaatatggcctcatgggaagggaaagacctgaccg

SEQ ID NO: 1742 - DNA, 50 bp, synthetic construct; identical to SEQ ID NO: 1622
  source 1..50: mol_type = other DNA; mol_type = other DNA

SEQ ID NO: 1743 - DNA, 50 bp, synthetic construct
  source 1..50: mol_type = other DNA; mol_type = other DNA
agaggaaggcattcctcttgcagttgagacaagaggaaggcatctgtctc

SEQ ID NO: 1744 - DNA, 50 bp, synthetic construct; identical to SEQ ID NO: 1624
  source 1..50: mol_type = other DNA; mol_type = other DNA

SEQ ID NO: 1745 - DNA, 50 bp, synthetic construct
  source 1..50: mol_type = other DNA; mol_type = other DNA
ttccatctactgagataggaagaaaacgccttagggctggaggtgggaca

SEQ ID NO: 1746 - DNA, 50 bp, synthetic construct
  source 1..50: mol_type = other DNA; mol_type = other DNA
tgcaggcagcaatactgctttgtaaagcattgagatgtttatgtgtatgc

SEQ ID NO: 1747 - DNA, 50 bp, synthetic construct
  source 1..50: mol_type = other DNA; mol_type = other DNA
atatctaaaagcacagcacttgattctttaccttgtctatgatgcaaaga

SEQ ID NO: 1748 - DNA, 50 bp, synthetic construct
  source 1..50: mol_type = other DNA; mol_type = other DNA
cctttgttcacgtgtttgtctgctgaccctctccccactattgtcttgtg

SEQ ID NO: 1749 - DNA, 50 bp, synthetic construct
  source 1..50: mol_type = other DNA; mol_type = other DNA
accatgacacatccccctctcagagaaacacccacgaatgatcaataaat

SEQ ID NO: 1750 - DNA, 50 bp, synthetic construct
  source 1..50: mol_type = other DNA; mol_type = other DNA
actaagggaactcagagacggcgcggatcctccatatgctgaacgctggt

SEQ ID NO: 1751 - DNA, 50 bp, synthetic construct
  source 1..50: mol_type = other DNA; mol_type = other DNA
tccctgggtccccttatttctttctctatactttgtctctgtgtcttttt

SEQ ID NO: 1752 - DNA, 50 bp, synthetic construct
  source 1..50: mol_type = other DNA; mol_type = other DNA
cttttccaagtctctcattccaccttaagagaaacactcacaggtgtgga

SEQ ID NO: 1753 - DNA, 20 bp, synthetic construct
  source 1..20: mol_type = other DNA; mol_type = other DNA
ggggcaacccatcccttcag

SEQ ID NO: 1754 - DNA, 50 bp, synthetic construct
  source 1..50: mol_type = other DNA; mol_type = other DNA
tgtggggaaaagcaagagagatcagattgttactgtgtctgtacagaaag

SEQ ID NO: 1755 - DNA, 50 bp, synthetic construct; identical to SEQ ID NO: 1615
  source 1..50: mol_type = other DNA; mol_type = other DNA

SEQ ID NO: 1756 - DNA, 50 bp, synthetic construct
  source 1..50: mol_type = other DNA; mol_type = other DNA
gccttgagattctgttaatctatgaccttacccccaaccccgtgctctcg

SEQ ID NO: 1757 - DNA, 50 bp, synthetic construct; identical to SEQ ID NO: 1657
  source 1..50: mol_type = other DNA; mol_type = other DNA

SEQ ID NO: 1758 - DNA, 50 bp, synthetic construct
  source 1..50: mol_type = other DNA; mol_type = other DNA
agatgtgctttgttaaacagatgcttaaaggcagcatgctccttaagagt

SEQ ID NO: 1759 - DNA, 50 bp, synthetic construct; identical to SEQ ID NO: 1619
  source 1..50: mol_type = other DNA; mol_type = other DNA

SEQ ID NO: 1760 - DNA, 50 bp, synthetic construct; identical to SEQ ID NO: 1660
  source 1..50: mol_type = other DNA; mol_type = other DNA

SEQ ID NO: 1761 - DNA, 50 bp, synthetic construct; identical to SEQ ID NO: 1621
  source 1..50: mol_type = other DNA; mol_type = other DNA

SEQ ID NO: 1762 - DNA, 50 bp, synthetic construct; identical to SEQ ID NO: 1622
  source 1..50: mol_type = other DNA; mol_type = other DNA

SEQ ID NO: 1763 - DNA, 50 bp, synthetic construct; identical to SEQ ID NO: 1723
  source 1..50: mol_type = other DNA; mol_type = other DNA

SEQ ID NO: 1764 - DNA, 50 bp, synthetic construct
  source 1..50: mol_type = other DNA; mol_type = other DNA
ctgcccgtccctgggcaatggaatgtctcggtataaaacccgattgtatg

SEQ ID NO: 1765 - DNA, 50 bp, synthetic construct
  source 1..50: mol_type = other DNA; mol_type = other DNA
ctccatctactgagataggggaaaaccgccttagggctggaggtgggaca

SEQ ID NO: 1766 - DNA, 50 bp, synthetic construct
  source 1..50: mol_type = other DNA; mol_type = other DNA
ttcgggcagcaatactgctttgtaaagcactgagatgtttatgtgtatgc

SEQ ID NO: 1767 - DNA, 50 bp, synthetic construct
  source 1..50: mol_type = other DNA; mol_type = other DNA
gtatctaaaagcacagcacttaatcctttaccttgtctatgatgcaaaga

SEQ ID NO: 1768 - DNA, 50 bp, synthetic construct; identical to SEQ ID NO: 1748
  source 1..50: mol_type = other DNA; mol_type = other DNA

SEQ ID NO: 1769 - DNA, 50 bp, synthetic construct
  source 1..50: mol_type = other DNA; mol_type = other DNA
accctgccacatccccctctcggagaaacacccatgaatgatcaataaat

SEQ ID NO: 1770 - DNA, 50 bp, synthetic construct; identical to SEQ ID NO: 1670
  source 1..50: mol_type = other DNA; mol_type = other DNA

SEQ ID NO: 1771 - DNA, 50 bp, synthetic construct
  source 1..50: mol_type = other DNA; mol_type = other DNA
tccccgggtccccttatttctttctctatactttgtctctgtgtcttttt

SEQ ID NO: 1772 - DNA, 50 bp, synthetic construct
  source 1..50: mol_type = other DNA; mol_type = other DNA
cttttccaagtctctcgttccaccttacgagaaacacccacaagtgtgga

SEQ ID NO: 1773 - DNA, 20 bp, synthetic construct
  source 1..20: mol_type = other DNA; mol_type = other DNA
ggggcaacccaccccttcac

SEQ ID NO: 1774 - DNA, 50 bp, synthetic construct; identical to SEQ ID NO: 1614
  source 1..50: mol_type = other DNA; mol_type = other DNA

SEQ ID NO: 1775 - DNA, 50 bp, synthetic construct
  source 1..50: mol_type = other DNA; mol_type = other DNA
aagtagacataggagactccattttgttctgtactaaggcaaattcttct

SEQ ID NO: 1776 - DNA, 50 bp, synthetic construct
  source 1..50: mol_type = other DNA; mol_type = other DNA
gccttgagattctgttaatctatgaccttaccctcaaccccgtgctctcg

SEQ ID NO: 1777 - DNA, 50 bp, synthetic construct; identical to SEQ ID NO: 1657
  source 1..50: mol_type = other DNA

SEQ ID NO: 1778 - DNA, 50 bp, synthetic construct
  source 1..50: mol_type = other DNA; mol_type = other DNA
agatgtgctttgttaaacaaatgcttgaaggcagcatgctcgttaagagt

SEQ ID NO: 1779 - DNA, 50 bp, synthetic construct; identical to SEQ ID NO: 1659
  source 1..50: mol_type = other DNA; mol_type = other DNA

SEQ ID NO: 1780 - DNA, 50 bp, synthetic construct; identical to SEQ ID NO: 1660
  source 1..50: mol_type = other DNA; mol_type = other DNA

SEQ ID NO: 1781 - DNA, 50 bp, synthetic construct
  source 1..50: mol_type = other DNA; mol_type = other DNA
ccgtgtgatagtctgaaatatggcctcgtgggaagggaaagacctgaccg

SEQ ID NO: 1782 - DNA, 50 bp, synthetic construct; identical to SEQ ID NO: 1622
  source 1..50: mol_type = other DNA; mol_type = other DNA

SEQ ID NO: 1783 - DNA, 50 bp, synthetic construct; identical to SEQ ID NO: 1723
  source 1..50: mol_type = other DNA; mol_type = other DNA

SEQ ID NO: 1784 - DNA, 50 bp, synthetic construct
  source 1..50: mol_type = other DNA; mol_type = other DNA
ctgcccgtccctgggcaatggaatgtctcggtataaaacccgattgtaca

SEQ ID NO: 1785 - DNA, 50 bp, synthetic construct
  source 1..50: mol_type = other DNA; mol_type = other DNA
ttccatctactgagataaggaaaaaccgccttagggctggaggtgggaca

SEQ ID NO: 1786 - DNA, 50 bp, synthetic construct
  source 1..50: mol_type = other DNA; mol_type = other DNA
tgcaggcagcaatactgctttgtaaagcattaagatgtttatgtgtatgc

SEQ ID NO: 1787 - DNA, 50 bp, synthetic construct; identical to SEQ ID NO: 1627
  source 1..50: mol_type = other DNA; mol_type = other DNA

SEQ ID NO: 1788 - DNA, 50 bp, synthetic construct; identical to SEQ ID NO: 1748
  source 1..50: mol_type = other DNA; mol_type = other DNA

SEQ ID NO: 1789 - DNA, 50 bp, synthetic construct
  source 1..50: mol_type = other DNA; mol_type = other DNA
accctgacacatccccctctcggagaaacacccacgaatgatgaataaat

SEQ ID NO: 1790 - DNA, 50 bp, synthetic construct; identical to SEQ ID NO: 1670
  source 1..50: mol_type = other DNA; mol_type = other DNA

SEQ ID NO: 1791 - DNA, 50 bp, synthetic construct; identical to SEQ ID NO: 1751
  source 1..50: mol_type = other DNA; mol_type = other DNA

SEQ ID NO: 1792 - DNA, 50 bp, synthetic construct
  source 1..50: mol_type = other DNA; mol_type = other DNA
cttttccaagtctctcgtcccacttaacgagaaacacccacaggtgtgga

SEQ ID NO: 1793 - DNA, 20 bp, synthetic construct
  source 1..20: mol_type = other DNA; mol_type = other DNA
ggggcaacccaccccttcag

SEQ ID NO: 1794 - DNA, 50 bp, synthetic construct
  source 1..50: mol_type = other DNA; mol_type = other DNA
aggcgcctgtagtcccagctattcgggaggctgaggcaggagaatggcat

SEQ ID NO: 1795 - DNA, 50 bp, synthetic construct
  source 1..50: mol_type = other DNA; mol_type = other DNA
gaacccgggaggcggagcttgcagtgagccgagatcgcgccactgcactc

SEQ ID NO: 1796 - DNA, 50 bp, synthetic construct
  source 1..50: mol_type = other DNA; mol_type = other DNA
cagcctgggcgacagagcgagactccctctcaaaaaaaaaacaaaaaaac

SEQ ID NO: 1797 - DNA, 10 bp, synthetic construct
  source 1..10: mol_type = other DNA; mol_type = other DNA
aaaaaaacca

SEQ ID NO: 1798 - DNA, 50 bp, synthetic construct
  source 1..50: mol_type = other DNA; mol_type = other DNA
gccgggcgcggtggctcaagcctgtaatcccagcactttgggaggccgag

SEQ ID NO: 1799 - DNA, 50 bp, synthetic construct
  source 1..50: mol_type = other DNA; mol_type = other DNA
gcgggcggatcacgaggtcaggagatcgagaccatcctggctaacacagt

SEQ ID NO: 1800 - DNA, 50 bp, synthetic construct
  source 1..50: mol_type = other DNA; mol_type = other DNA
gaaaccccgtctctactaaaaatacagaaaaattagccgggcatggtggc

SEQ ID NO: 1801 - DNA, 50 bp, synthetic construct; identical to SEQ ID NO: 1794
  source 1..50: mol_type = other DNA; mol_type = other DNA

SEQ ID NO: 1802 - DNA, 50 bp, synthetic construct; identical to SEQ ID NO: 1795
  source 1..50: mol_type = other DNA; mol_type = other DNA

SEQ ID NO: 1803 - DNA, 50 bp, synthetic construct; identical to SEQ ID NO: 1796
  source 1..50: mol_type = other DNA; mol_type = other DNA

SEQ ID NO: 1804 - skipped

SEQ ID NO: 1805 - DNA, 50 bp, synthetic construct
  source 1..50: mol_type = other DNA; mol_type = other DNA
ggccgggtgcggttgctcatgcctgtaatcccagcactttgggaggccga

SEQ ID NO: 1806 - DNA, 50 bp, synthetic construct
  source 1..50: mol_type = other DNA; mol_type = other DNA
ggcaggcagatcacgaggtcaggagattgagaccatgctggccaacacgg

SEQ ID NO: 1807 - DNA, 50 bp, synthetic construct
  source 1..50: mol_type = other DNA; mol_type = other DNA
tgaaaccccatctctactaaaaaaaatacacaaaattagctgggcgtggt

SEQ ID NO: 1808 - DNA, 50 bp, synthetic construct
  source 1..50: mol_type = other DNA; mol_type = other DNA
ggcaggcgcctgtagtcccagctattcgggaggctggggcaggagaatgg

SEQ ID NO: 1809 - DNA, 50 bp, synthetic construct
  source 1..50: mol_type = other DNA; mol_type = other DNA
cgtgaacccggaaggcagagcttgcagtgagcgagatcgcaccactgcac

SEQ ID NO: 1810 - DNA, 50 bp, synthetic construct
  source 1..50: mol_type = other DNA; mol_type = other DNA
tccagcctgggcaacagagtgagactctgtctcaaaaaaaaaaaaaaaaa

SEQ ID NO: 1811 - DNA, 11 bp, synthetic construct
  source 1..11: mol_type = other DNA; mol_type = other DNA
aaaaaagagag

SEQ ID NO: 1812 - DNA, 50 bp, synthetic construct
  source 1..50: mol_type = other DNA; mol_type = other DNA
ggccgggtgcggtggctcacgtctgtaatcccagcactttgggaggccga

SEQ ID NO: 1813 - DNA, 50 bp, synthetic construct
  source 1..50: mol_type = other DNA; mol_type = other DNA
ggcgggtggatcacaaggtcaggagattgagaccatcctggctaacatag

SEQ ID NO: 1814 - DNA, 50 bp, synthetic construct
  source 1..50: mol_type = other DNA; mol_type = other DNA
tgaaatccgtctctattaaaaatacaaaaaattagccaggcgtggtggcg

SEQ ID NO: 1815 - DNA, 50 bp, synthetic construct
  source 1..50: mol_type = other DNA; mol_type = other DNA
ggtgcctgtagtcccagctactctggaggctgaggcaggagaatggcatg

SEQ ID NO: 1816 - DNA, 50 bp, synthetic construct
  source 1..50: mol_type = other DNA; mol_type = other DNA
aacccgggaggtgggcttgcagtgagctgagatcgcgccactgcactcca

SEQ ID NO: 1817 - DNA, 50 bp, synthetic construct
  source 1..50: mol_type = other DNA; mol_type = other DNA
gcctgggcgacagagcgagactctgtccccaaaataaaaaaaaaaaaaaa

SEQ ID NO: 1818 - DNA, 13 bp, synthetic construct
  source 1..13: mol_type = other DNA; mol_type = other DNA
aaaaaaaaagaac

SEQ ID NO: 1819 - DNA, 50 bp, synthetic construct
  source 1..50: mol_type = other DNA; mol_type = other DNA
gccgggtgcggtggctcacgcctgtaatcccagcactttgggaggctgag

SEQ ID NO: 1820 - DNA, 50 bp, synthetic construct; identical to SEQ ID NO: 1799
  source 1..50: mol_type = other DNA; mol_type = other DNA

SEQ ID NO: 1821 - DNA, 50 bp, synthetic construct
  source 1..50: mol_type = other DNA; mol_type = other DNA
gaaaccctgtctctactaaaaatacaaaaaattagccgggcgcggtggcg

SEQ ID NO: 1822 - DNA, 50 bp, synthetic construct
  source 1..50: mol_type = other DNA; mol_type = other DNA
ggcacctgtagtcccagctattcgggaggctgaggcaggagaaaggcatg

SEQ ID NO: 1823 - DNA, 50 bp, synthetic construct
  source 1..50: mol_type = other DNA; mol_type = other DNA
aacccgggaggcggggcttgcagtgagctgagatcgtgccactgcactcc

SEQ ID NO: 1824 - DNA, 50 bp, synthetic construct
  source 1..50: mol_type = other DNA; mol_type = other DNA
agcctgggtgacagagcgagactccatctcaaaaaagaaaaaaaaaaaga

SEQ ID NO: 1825 - DNA, 50 bp, synthetic construct
  source 1..50: mol_type = other DNA; mol_type = other DNA
aaaagaaaaagaaaaaaagatgagttcatgtcctttgcagggacatggat

SEQ ID NO: 1826 - DNA, 15 bp, synthetic construct
  source 1..15: mol_type = other DNA; mol_type = other DNA
gaatggatgaagctg

SEQ ID NO: 1827 - DNA, 50 bp, synthetic construct
  source 1..50: mol_type = other DNA; mol_type = other DNA
ggccgggcgcggtggctcaagcctgtaatcccagcactatgggaggccaa

SEQ ID NO: 1828 - DNA, 50 bp, synthetic construct
  source 1..50: mol_type = other DNA; mol_type = other DNA
ggcaggcagatcacaaggtcaggaaattgaggccatcctggctaacacgg

SEQ ID NO: 1829 - DNA, 50 bp, synthetic construct
  source 1..50: mol_type = other DNA; mol_type = other DNA
tgaaaccccgtctctactaaaaatacaaaaaattagccaggcgtggtggc

SEQ ID NO: 1830 - DNA, 50 bp, synthetic construct
  source 1..50: mol_type = other DNA; mol_type = other DNA
gggcgcctgtagtcccagctacttgggaggctgaggcaggagaatggcat

SEQ ID NO: 1831 - DNA, 50 bp, synthetic construct
  source 1..50: mol_type = other DNA; mol_type = other DNA
gaacctgggaggcggagcttgcagtgagccaagattgcgccactgcactc

SEQ ID NO: 1832 - DNA, 50 bp, synthetic construct
  source 1..50: mol_type = other DNA; mol_type = other DNA
cagcctggatgacagaggaagactccatctcaaaaaaaaaaaaaaataaa

SEQ ID NO: 1833 - skipped

SEQ ID NO: 1834 - DNA, 50 bp, synthetic construct
  source 1..50: mol_type = other DNA; mol_type = other DNA
ggccgggcgcggtggctcaagcctgtaatcccagcactttgggaggccga

SEQ ID NO: 1835 - DNA, 50 bp, synthetic construct
  source 1..50: mol_type = other DNA; mol_type = other DNA
ggtgggcagatcacaaggtcaggagatcaagaccatcctggctaacacgg

SEQ ID NO: 1836 - DNA, 50 bp, synthetic construct
  source 1..50: mol_type = other DNA; mol_type = other DNA
tgaaaccctgtctctactaaaaatacacaaaaaaattagccaggcgtggt

SEQ ID NO: 1837 - DNA, 50 bp, synthetic construct
  source 1..50: mol_type = other DNA; mol_type = other DNA
ggcgggcgcctgtagtcccagctactcgggaggctgaggcaggagaatgg

SEQ ID NO: 1838 - DNA, 50 bp, synthetic construct
  source 1..50: mol_type = other DNA; mol_type = other DNA
cgtgaacccaggaggcggagcttgcagtgagcggagatatagcgccactg

SEQ ID NO: 1839 - DNA, 50 bp, synthetic construct
  source 1..50: mol_type = other DNA; mol_type = other DNA
cactccagcctgggcgacagagtgagactccgtctcaaaaaaaaaaaaaa

SEQ ID NO: 1840 - skipped

SEQ ID NO: 1841 - DNA, 50 bp, synthetic construct; identical to SEQ ID NO: 1798
  source 1..50: mol_type = other DNA; mol_type = other DNA

SEQ ID NO: 1842 - DNA, 50 bp, synthetic construct
  source 1..50: mol_type = other DNA; mol_type = other DNA
gcgggcggatcacgaggtcaggagatcgagaccatcctggctaacacggt

SEQ ID NO: 1843 - DNA, 50 bp, synthetic construct
  source 1..50: mol_type = other DNA; mol_type = other DNA
gaaaccccgtctctactaaaaacacacaaaaaatgagccgggcgcggtgg

SEQ ID NO: 1844 - DNA, 50 bp, synthetic construct
  source 1..50: mol_type = other DNA; mol_type = other DNA
caggcgcctgtagtcccagctattcaggaggctgaggcaggagaatggtg

SEQ ID NO: 1845 - DNA, 50 bp, synthetic construct
  source 1..50: mol_type = other DNA; mol_type = other DNA
tgaacccgggaggcggagcttgcagtgagctgagatcgcgcaactgcact

SEQ ID NO: 1846 - DNA, 50 bp, synthetic construct
  source 1..50: mol_type = other DNA; mol_type = other DNA
ctagcctgggcgacagagcgagactccgtctcaaaaaaaaaaaaaaaaaa

SEQ ID NO: 1847 - skipped

SEQ ID NO: 1848 - DNA, 32 bp, synthetic construct
  source 1..32: mol_type = other DNA; mol_type = other DNA
aaataaataaatacacagatacataaataaat

SEQ ID NO: 1849 - DNA, 33 bp, synthetic construct
  source 1..33: mol_type = other DNA; mol_type = other DNA
tgtctcttaaaaataaaaaaatgtgtcagatat

SEQ ID NO: 1850 - DNA, 26 bp, synthetic construct
  source 1..26: mol_type = other DNA; mol_type = other DNA
taaataaatacacagatgaaataaaa

SEQ ID NO: 1851 - DNA, 23 bp, synthetic construct
  source 1..23: mol_type = other DNA; mol_type = other DNA
tgtctcttaaaaataaataaatt

SEQ ID NO: 1852 - DNA, 50 bp, synthetic construct
  source 1..50: mol_type = other DNA; mol_type = other DNA
ctcattcccacctcagggcctttgcacttgctgtttcttctccccacttt

SEQ ID NO: 1853 - DNA, 50 bp, synthetic construct
  source 1..50: mol_type = other DNA; mol_type = other DNA
tcaagcggctgcttccttccaatcttcaggtttccactctgatgtcacct

SEQ ID NO: 1854 - DNA, 23 bp, synthetic construct
  source 1..23: mol_type = other DNA; mol_type = other DNA
cctcctggaggccttccctgacc

SEQ ID NO: 1855 - DNA, 50 bp, synthetic construct
  source 1..50: mol_type = other DNA; mol_type = other DNA
cctcatggcctttgcactagcagctgcctcttctggaatgttcttttcct

SEQ ID NO: 1856 - DNA, 30 bp, synthetic construct
  source 1..30: mol_type = other DNA; mol_type = other DNA
tgatcctgcatggctgtatccttctcacca

SEQ ID NO: 1857 - DNA, 50 bp, synthetic construct
  source 1..50: mol_type = other DNA; mol_type = other DNA
cctgccagcctcaagtccagacactccttcattcactaggctccagtcat

SEQ ID NO: 1858 - DNA, 50 bp, synthetic construct
  source 1..50: mol_type = other DNA; mol_type = other DNA
gttgccttttttttttcctgttctttgaaccaccccagctcattcccacc

SEQ ID NO: 1859 - DNA, 20 bp, synthetic construct
  source 1..20: mol_type = other DNA; mol_type = other DNA
tccaggcctttgcacttgct

SEQ ID NO: 1860 - DNA, 40 bp, synthetic construct
  source 1..40: mol_type = other DNA; mol_type = other DNA
ggaggccttccctgtcctcccaatctaaagtagctcccag

SEQ ID NO: 1861 - DNA, 40 bp, synthetic construct
  source 1..40: mol_type = other DNA; mol_type = other DNA
cctgagcatgtcatgtcccctccctgggcttcagtttccc

SEQ ID NO: 1862 - DNA, 50 bp, synthetic construct
  source 1..50: mol_type = other DNA; mol_type = other DNA
gaatgtcatgtcccctgccctaaactcatcaaggatttagagttaagaac

SEQ ID NO: 1863 - DNA, 50 bp, synthetic construct
  source 1..50: mol_type = other DNA; mol_type = other DNA
ccctgccctctactattttacagttgagtttactaacattaacttctgat

SEQ ID NO: 1864 - DNA, 50 bp, synthetic construct
  source 1..50: mol_type = other DNA; mol_type = other DNA
taagttttgcaacactcctaaacattatctcagaatctcaggggtcttgt

SEQ ID NO: 1865 - DNA, 50 bp, synthetic construct
  source 1..50: mol_type = other DNA; mol_type = other DNA
aaaatgaaagtcaaaagtaatcagtctattgggttataaactctgactgt

SEQ ID NO: 1866 - DNA, 50 bp, synthetic construct
  source 1..50: mol_type = other DNA; mol_type = other DNA
aaatcccttgtctatattctatgtaggttatatcatactacttgatactt

SEQ ID NO: 1867 - DNA, 50 bp, synthetic construct
  source 1..50: mol_type = other DNA; mol_type = other DNA
gataaatatagttaataagcagtaatatcaggataaggcaaccctaaagg

SEQ ID NO: 1868 - DNA, 50 bp, synthetic construct
  source 1..50: mol_type = other DNA; mol_type = other DNA
aacattttttttttctcaaaaattcccagatttccttttcttattccacc

SEQ ID NO: 1869 - DNA, 50 bp, synthetic construct
  source 1..50: mol_type = other DNA; mol_type = other DNA
tttattccctctccctattctggtgcaaattatgaaacaatcagtttttc

SEQ ID NO: 1870 - DNA, 50 bp, synthetic construct
  source 1..50: mol_type = other DNA; mol_type = other DNA
taggcccatagcccaaggactgtactgcctctaccaacaagaattcttta

SEQ ID NO: 1871 - DNA, 50 bp, synthetic construct
  source 1..50: mol_type = other DNA; mol_type = other DNA
agtttgccaactcagcaaatcctcttcacaagaactcctgggactctttc

SEQ ID NO: 1872 - DNA, 37 bp, synthetic construct
  source 1..37: mol_type = other DNA; mol_type = other DNA
tgtcatgtcccttaccttccctgggactcagtttcct

SEQ ID NO: 1873 - DNA, 30 bp, synthetic construct
  source 1..30: mol_type = other DNA; mol_type = other DNA
cctgtatgtcatgtcccctcctagactcac

SEQ ID NO: 1874 - DNA, 20 bp, synthetic construct
  source 1..20: mol_type = other DNA; mol_type = other DNA
tcagtttcccagtggtaaag

SEQ ID NO: 1875 - DNA, 40 bp, synthetic construct
  source 1..40: mol_type = other DNA; mol_type = other DNA
aaattagctgggtatggtggcatgcgcctatagtcccagc

SEQ ID NO: 1876 - DNA, 40 bp, synthetic construct; identical to SEQ ID NO: 1875
  source 1..40: mol_type = other DNA; mol_type = other DNA

SEQ ID NO: 1877 - DNA, 40 bp, synthetic construct
  source 1..40: mol_type = other DNA; mol_type = other DNA
aaattagctgggtatggtggcatgcgcctatagtcccaac

SEQ ID NO: 1878 - DNA, 40 bp, synthetic construct
  source 1..40: mol_type = other DNA; mol_type = other DNA
aaattagctgggtatggtggcatgcgcctgtagtcccagc

SEQ ID NO: 1879 - DNA, 40 bp, synthetic construct
  source 1..40: mol_type = other DNA; mol_type = other DNA
aaattagctgagtatggtggcatgcgcctatagtcccagc

SEQ ID NO: 1880 - DNA, 40 bp, synthetic construct
  source 1..40: mol_type = other DNA; mol_type = other DNA
aaattagctgggtgtggtggcatgcgcctatagtcccagc

SEQ ID NO: 1881 - DNA, 41 bp, synthetic construct
  source 1..41: mol_type = other DNA; mol_type = other DNA
aaattagctgggtatggtggcatgcgcctgtagtcccagct

SEQ ID NO: 1882 - DNA, 40 bp, synthetic construct; identical to SEQ ID NO: 1878
  source 1..40: mol_type = other DNA; mol_type = other DNA

SEQ ID NO: 1883 - DNA, 25 bp, synthetic construct
  source 1..25: mol_type = other DNA; mol_type = other DNA
ggtggcatgcgcctatagtcccagc

SEQ ID NO: 1884 - DNA, 59 bp, synthetic construct
  source 1..59: mol_type = other DNA; mol_type = other DNA
aaaaaaaaaaaaaattagctgggcatggtggcgggcgcctgtagtcccaactacttggg

SEQ ID NO: 1885 - DNA, 59 bp, synthetic construct
  source 1..59: mol_type = other DNA; mol_type = other DNA
acaaaaaaaaaaaattagctgggcatggtggcgggcgcctgtagtcccaactactcggg

SEQ ID NO: 1886 - DNA, 50 bp, synthetic construct
  source 1..50: mol_type = other DNA; mol_type = other DNA
caaaaaataacagaaattagctgggtatggtggcatgtggctatagtccc

SEQ ID NO: 1887 - skipped

SEQ ID NO: 1888 - DNA, 50 bp, synthetic construct
  source 1..50: mol_type = other DNA; mol_type = other DNA
caaaaaataccaaaattagctgggtatggtggcatgcgcctgtagtccca

SEQ ID NO: 1889 - DNA, 50 bp, synthetic construct
  source 1..50: mol_type = other DNA; mol_type = other DNA
ggcccagcgtggtggctcacgcctgtaatcccagcactttgtgaggccaa

SEQ ID NO: 1890 - DNA, 50 bp, synthetic construct
  source 1..50: mol_type = other DNA; mol_type = other DNA
gcggggaggaaagttgagctcaggagttcaagactagcctggacaacaag

SEQ ID NO: 1891 - DNA, 50 bp, synthetic construct
  source 1..50: mol_type = other DNA; mol_type = other DNA
gttaaaccacttctttacaaaaaatacaaaaacttagccgggcatggtgg

SEQ ID NO: 1892 - DNA, 50 bp, synthetic construct
  source 1..50: mol_type = other DNA; mol_type = other DNA
tgtgctcccgtagtcccagctatgcaagaggctgaagtgggaggattgct

SEQ ID NO: 1893 - DNA, 50 bp, synthetic construct
  source 1..50: mol_type = other DNA; mol_type = other DNA
tgagcccaggaggtagaggctgcagtgagcagagattgtgccactgcact

SEQ ID NO: 1894 - DNA, 36 bp, synthetic construct
  source 1..36: mol_type = other DNA; mol_type = other DNA
ccagcctgggcgacagagacagaccgtgtctcaaaa

SEQ ID NO: 1895 - DNA, 50 bp, synthetic construct
  source 1..50: mol_type = other DNA; mol_type = other DNA
ggccaggtgtggtggctcatgcctgtaatcccactttgggaggctgaggt

SEQ ID NO: 1896 - DNA, 50 bp, synthetic construct
  source 1..50: mol_type = other DNA; mol_type = other DNA
gggaggatcgcttgagcccaggagtttgagaccagcctgggcaacacagt

SEQ ID NO: 1897 - DNA, 14 bp, synthetic construct
  source 1..14: mol_type = other DNA; mol_type = other DNA
gagacccatctcta

SEQ ID NO: 1898 - DNA, 50 bp, synthetic construct
  source 1..50: mol_type = other DNA; mol_type = other DNA
gttcaaaactaaggaaaaccaaaagatatattgtgtaggcatgcagatat

SEQ ID NO: 1899 - skipped

SEQ ID NO: 1900 - DNA, 50 bp, synthetic construct
  source 1..50: mol_type = other DNA; mol_type = other DNA
tgcctatcttcaggatgaataaacaaactgtggtatatttacacaacaaa

SEQ ID NO: 1901 - DNA, 50 bp, synthetic construct
  source 1..50: mol_type = other DNA; mol_type = other DNA
atagtatacagcagtgaaaaagtgaattaactgtgaaacatgaatcatag

SEQ ID NO: 1902 - DNA, 50 bp, synthetic construct
  source 1..50: mol_type = other DNA; mol_type = other DNA
taacaggttgagtgaaaaaagcaagtaacaaaggacaacaaatcatatga

SEQ ID NO: 1903 - DNA, 26 bp, synthetic construct
  source 1..26: mol_type = other DNA; mol_type = other DNA
tgccctcttcataaaagttcaaaact

SEQ ID NO: 1904 - DNA, 50 bp, synthetic construct
  source 1..50: mol_type = other DNA; mol_type = other DNA
ggctgggtgcggtggctcacacctgtaatctcagcactttgggaggcaga

SEQ ID NO: 1905 - DNA, 50 bp, synthetic construct
  source 1..50: mol_type = other DNA; mol_type = other DNA
ggctggcgaatcacctgaggtcaggagttcgagaccagcctggccaacat

SEQ ID NO: 1906 - DNA, 50 bp, synthetic construct
  source 1..50: mol_type = other DNA; mol_type = other DNA
ggtgaaaccccgtctctactaaaaaaatacaaaaattagctgggcgtggt

SEQ ID NO: 1907 - DNA, 50 bp, synthetic construct
  source 1..50: mol_type = other DNA; mol_type = other DNA
ggttggcccctttaatcccagctactcaggaggctgaggcaggagaatcg

SEQ ID NO: 1908 - DNA, 50 bp, synthetic construct
  source 1..50: mol_type = other DNA; mol_type = other DNA
cttgaacctaggaggcagaggttgcagtaagcagaatgccactgcattcc

SEQ ID NO: 1909 - DNA, 48 bp, synthetic construct
  source 1..48: mol_type = other DNA; mol_type = other DNA
agcctgcgcgacagagtgagactttgtctcaaaaaaaaaaaaaaaaaa

SEQ ID NO: 1910 - DNA, 50 bp, synthetic construct
  source 1..50: mol_type = other DNA; mol_type = other DNA
ttagccgggcatggtgatgcatacctgtaatcctagctactcaggaggct

SEQ ID NO: 1911 - DNA, 50 bp, synthetic construct
  source 1..50: mol_type = other DNA; mol_type = other DNA
aaggcaggagaatcacttgaacctgggaggcagaggttgcagtgagccga

SEQ ID NO: 1912 - DNA, 50 bp, synthetic construct
  source 1..50: mol_type = other DNA
gatggtgctattgcactccagcctgggccacaagagaggaactccatctc

SEQ ID NO: 1913 - DNA, 19 bp, synthetic construct
  source 1..19: mol_type = other DNA; mol_type = other DNA
aaaaaaataaaaataaaaa

SEQ ID NO: 1914 - DNA, 50 bp, synthetic construct
  source 1..50: mol_type = other DNA; mol_type = other DNA
gtcagatgcagtggttcatgcctgtaatcccaacattttcagaggctgag

SEQ ID NO: 1915 - DNA, 50 bp, synthetic construct
  source 1..50: mol_type = other DNA; mol_type = other DNA
gcaggtggatcacctaaggtcaggagtttgagaccagcctggccaacatg

SEQ ID NO: 1916 - DNA, 50 bp, synthetic construct
  source 1..50: mol_type = other DNA; mol_type = other DNA
gtgaaaccccgtctctactaaaaatacaaaaagttagccaggcatggtgg

SEQ ID NO: 1917 - DNA, 50 bp, synthetic construct
  source 1..50: mol_type = other DNA; mol_type = other DNA
caggcacctgtaatcccagctactcaggtggctgaggcaggagaatcact

SEQ ID NO: 1918 - DNA, 50 bp, synthetic construct
  source 1..50: mol_type = other DNA; mol_type = other DNA
tgaacctgggaggcagaggttgctgtgagccgagattgtgccattgcaca

SEQ ID NO: 1919 - DNA, 45 bp, synthetic construct
  source 1..45: mol_type = other DNA; mol_type = other DNA
caacaagagcgaaactctgtctcaaaagaaaaaaaaaatacaaaa

SEQ ID NO: 1920 - DNA, 50 bp, synthetic construct
  source 1..50: mol_type = other DNA; mol_type = other DNA
ggctgggcacggtagctcacgcctgtaatagcactttaggaggccgagac

SEQ ID NO: 1921 - DNA, 50 bp, synthetic construct
  source 1..50: mol_type = other DNA; mol_type = other DNA
gggcagatcacctgaggtcaggagttagagaccaccctggccaacatggt

SEQ ID NO: 1922 - DNA, 32 bp, synthetic construct
  source 1..32: mol_type = other DNA; mol_type = other DNA
gaaaccctgtctctactaaaagtacaaaatta

SEQ ID NO: 1923 - DNA, 50 bp, synthetic construct
  source 1..50: mol_type = other DNA; mol_type = other DNA
tttagagcactgagtaatatataaaaacagcaatcatgtagtttttaaaa

SEQ ID NO: 1924 - DNA, 50 bp, synthetic construct
  source 1..50: mol_type = other DNA; mol_type = other DNA
cttagtctggggttaaagaagtatgtaaacaactatgttttcttaaagat

SEQ ID NO: 1925 - DNA, 50 bp, synthetic construct
  source 1..50: mol_type = other DNA; mol_type = other DNA
ttataggagcattgtgactggaccaaggacaaagaagttcccaacctcct

SEQ ID NO: 1926 - DNA, 50 bp, synthetic construct
  source 1..50: mol_type = other DNA; mol_type = other DNA
cagaccctcgctgctgcccagatgtctgccatggggtacttcttgaccac

SEQ ID NO: 1927 - DNA, 50 bp, synthetic construct
  source 1..50: mol_type = other DNA; mol_type = other DNA
accctccttctcttccctgcccttaacatagaaagagcctaagattgtac

SEQ ID NO: 1928 - DNA, 50 bp, synthetic construct
  source 1..50: mol_type = other DNA; mol_type = other DNA
tgacttaaaatggtactttagaacgctagtacaccgtcctctcagtcttg

SEQ ID NO: 1929 - DNA, 50 bp, synthetic construct
  source 1..50: mol_type = other DNA; mol_type = other DNA
ggccaggcgctgtggctcatgcctgtaatcccagcactgtgggaggccaa

SEQ ID NO: 1930 - DNA, 50 bp, synthetic construct
  source 1..50: mol_type = other DNA; mol_type = other DNA
ggcaggtggatcacctgaggtcaggagttcgagaccaacctgaccaatat

SEQ ID NO: 1931 - DNA, 50 bp, synthetic construct
  source 1..50: mol_type = other DNA; mol_type = other DNA
ggaaaccccatctctactaaaaatacaaaaattagctgggcgtggtggca

SEQ ID NO: 1932 - DNA, 50 bp, synthetic construct
  source 1..50: mol_type = other DNA; mol_type = other DNA
cactcccataatcccagctacttgggaggctgaggcaggagaattgcttg

SEQ ID NO: 1933 - DNA, 50 bp, synthetic construct
  source 1..50: mol_type = other DNA; mol_type = other DNA
cacccgggaggcagaggttgcagtgagccgagattgcaccattgcactcc

SEQ ID NO: 1934 - DNA, 50 bp, synthetic construct
  source 1..50: mol_type = other DNA; mol_type = other DNA
agcctgggcagtaagagcgaaactccatctcaaaaaaaaaaaaggaaaaa

SEQ ID NO: 1935 - skipped

SEQ ID NO: 1936 - DNA, 50 bp, synthetic construct
  source 1..50: mol_type = other DNA; mol_type = other DNA
aaaacacacaaagagataccacttcacacccattaggatggctgttatca

SEQ ID NO: 1937 - DNA, 50 bp, synthetic construct
  source 1..50: mol_type = other DNA; mol_type = other DNA
gaaaaataaggtaacagctgtttgctgagaaatatggagatgtggagaac

SEQ ID NO: 1938 - DNA, 50 bp, synthetic construct
  source 1..50: mol_type = other DNA; mol_type = other DNA
acgtggagaaattggcacacttgtgaattgctggtgggaatgtaaaatgg

SEQ ID NO: 1939 - DNA, 50 bp, synthetic construct
  source 1..50: mol_type = other DNA; mol_type = other DNA
tgcagtcgctctggaaaacagtatggcggttcctcaaaagaattaaacca

SEQ ID NO: 1940 - DNA, 50 bp, synthetic construct
  source 1..50: mol_type = other DNA; mol_type = other DNA
gaattaacacatgatccagaaatttcatagtactcaaaactactgaaagc

SEQ ID NO: 1941 - DNA, 50 bp, synthetic construct
  source 1..50: mol_type = other DNA; mol_type = other DNA
aggaactcaaattgatatctgtacaccagtgttcatagcggcattattca

SEQ ID NO: 1942 - DNA, 50 bp, synthetic construct
  source 1..50: mol_type = other DNA; mol_type = other DNA
caatagccaaaaggcggaaacaacccaaatgtccattgacgcatgaccag

SEQ ID NO: 1943 - DNA, 50 bp, synthetic construct
  source 1..50: mol_type = other DNA; mol_type = other DNA
gtggtggctcacacctgtaatctcagcactttgggaggctgagatgggtg

SEQ ID NO: 1944 - DNA, 50 bp, synthetic construct
  source 1..50: mol_type = other DNA; mol_type = other DNA
gatcgcttgagcccaggagttcaagaccagcttgggcaacacggtgagac

SEQ ID NO: 1945 - DNA, 50 bp, synthetic construct
  source 1..50: mol_type = other DNA; mol_type = other DNA
ctcatctttacaaaaaaaatacaaacattagctggcatggtggtgtgcac

SEQ ID NO: 1946 - DNA, 50 bp, synthetic construct
  source 1..50: mol_type = other DNA; mol_type = other DNA
ctatagtcccagctactccagaggctgaggtgggaggatcacgtgagccc

SEQ ID NO: 1947 - DNA, 50 bp, synthetic construct
  source 1..50: mol_type = other DNA; mol_type = other DNA
aggaggtggaggctgcagtgagcagaggtcgcactactgcactccagcct

SEQ ID NO: 1948 - DNA, 30 bp, synthetic construct
  source 1..30: mol_type = other DNA; mol_type = other DNA
gggtgacagggcgagaccctgtctcaaaaa

SEQ ID NO: 1949 - DNA, 50 bp, synthetic construct
  source 1..50: mol_type = other DNA; mol_type = other DNA
gtggctcacacctgtaatcccagcactttgtcaggccaaggcgggcagat

SEQ ID NO: 1950 - DNA, 50 bp, synthetic construct
  source 1..50: mol_type = other DNA; mol_type = other DNA
tgcttgagctcagaagttcaagactagcctgggcaacatggtgaaacccc

SEQ ID NO: 1951 - DNA, 50 bp, synthetic construct
  source 1..50: mol_type = other DNA; mol_type = other DNA
atctctacaaaaatacaaaaactagctaggcatggtggtgtgtacctgta

SEQ ID NO: 1952 - DNA, 50 bp, synthetic construct
  source 1..50: mol_type = other DNA; mol_type = other DNA
gtcctagcaactcaggaggctgaggtgggaggatggctcaagccaggagg

SEQ ID NO: 1953 - DNA, 50 bp, synthetic construct
  source 1..50: mol_type = other DNA; mol_type = other DNA
tggaggttgcagtgagcagaaataacatcatgccactgaactccagcctg

SEQ ID NO: 1954 - DNA, 30 bp, synthetic construct
  source 1..30: mol_type = other DNA; mol_type = other DNA
ggcggcaaagccagaccctgtctcaaaata

SEQ ID NO: 1955 - DNA, 50 bp, synthetic construct
  source 1..50: mol_type = other DNA; mol_type = other DNA
gcgtggtggctcatgcctgtaatcccagcactttgggaggccgaggcacg

SEQ ID NO: 1956 - DNA, 50 bp, synthetic construct
  source 1..50: mol_type = other DNA; mol_type = other DNA
cggatcacgaggtcaggagttcaagactagcctggccaacaaagtgaaac

SEQ ID NO: 1957 - DNA, 50 bp, synthetic construct
  source 1..50: mol_type = other DNA; mol_type = other DNA
cccgtctctactaaaaatacaaaaaattagcagggcgtggtagaaggcgc

SEQ ID NO: 1958 - DNA, 50 bp, synthetic construct
  source 1..50: mol_type = other DNA; mol_type = other DNA
ctgtaatcccagctactcgggaggctgaggcaggagaatcacttgaacct

SEQ ID NO: 1959 - DNA, 50 bp, synthetic construct
  source 1..50: mol_type = other DNA; mol_type = other DNA
gggaggtggaggttgcagtgagcagagattgcgccactgcactctagcct

SEQ ID NO: 1960 - DNA, 40 bp, synthetic construct
  source 1..40: mol_type = other DNA; mol_type = other DNA
gggtgacagtgtgagactctgtactctgtctcaaaaaaaa

SEQ ID NO: 1961 - DNA, 50 bp, synthetic construct
  source 1..50: mol_type = other DNA; mol_type = other DNA
tggtggctcacacctgtaatcccagcactttgggtggccgaggcggtgat

SEQ ID NO: 1962 - DNA, 50 bp, synthetic construct
  source 1..50: mol_type = other DNA; mol_type = other DNA
cgcctgagctcaggagttcaagactagcctgggcaacatggcaaaacccc

SEQ ID NO: 1963 - DNA, 50 bp, synthetic construct
  source 1..50: mol_type = other DNA; mol_type = other DNA
acctctacaaaaaaatacaaaaaattagctgggcatggtggtgtgcactt

SEQ ID NO: 1964 - DNA, 50 bp, synthetic construct
  source 1..50: mol_type = other DNA; mol_type = other DNA
gtagtcccagctacttaggaggctgaggtgggaagactgcttcagcccag

SEQ ID NO: 1965 - DNA, 50 bp, synthetic construct
  source 1..50: mol_type = other DNA; mol_type = other DNA
gaggtaaaggttgcagtgagccaagatcgcaccactgcactctccagcct

SEQ ID NO: 1966 - DNA, 31 bp, synthetic construct
  source 1..31: mol_type = other DNA; mol_type = other DNA
gggtgacagagccataccctctctctcaaaa

SEQ ID NO: 1967 - DNA, 50 bp, synthetic construct
  source 1..50: mol_type = other DNA; mol_type = other DNA
gcgtggtggctcacacctgtaatcccagcactttggaaggctgaggtggg

SEQ ID NO: 1968 - DNA, 20 bp, synthetic construct
  source 1..20: mol_type = other DNA; mol_type = other DNA
aggatcgcttgaggccagga

SEQ ID NO: 1969 - DNA, 32 bp, synthetic construct
  source 1..32: mol_type = other DNA; mol_type = other DNA
aggagttggagactagcctgggcaacatcgtg

SEQ ID NO: 1970 - DNA, 50 bp, synthetic construct
  source 1..50: mol_type = other DNA; mol_type = other DNA
aaaccccatctctacaaaaaatataaaaattagccaggcttggtggtgtg

SEQ ID NO: 1971 - DNA, 50 bp, synthetic construct
  source 1..50: mol_type = other DNA; mol_type = other DNA
cacctgtgatcccagctactcaggaggctgaggtgggaggatcgcttgag

SEQ ID NO: 1972 - DNA, 50 bp, synthetic construct
  source 1..50: mol_type = other DNA; mol_type = other DNA
cctgtgaggtagaggctgcagtgtgcagtgatgaagcctgggcgacagag

SEQ ID NO: 1973 - DNA, 20 bp, synthetic construct
  source 1..20: mol_type = other DNA; mol_type = other DNA
caagactctgtctcaaaaat

SEQ ID NO: 1974 - DNA, 50 bp, synthetic construct
  source 1..50: mol_type = other DNA; mol_type = other DNA
ggccaggtgtggccgggcgcggtggctcacgcctgtaatcccagaacttt

SEQ ID NO: 1975 - DNA, 50 bp, synthetic construct
  source 1..50: mol_type = other DNA; mol_type = other DNA
gggaggccgaggcgggcagatcacgaggtcaggagatcaagaccatcctg

SEQ ID NO: 1976 - DNA, 50 bp, synthetic construct
  source 1..50: mol_type = other DNA; mol_type = other DNA
gctaacacagtgaaaccccgtctctactaaaaatacaaaaaattagccgg

SEQ ID NO: 1977 - DNA, 50 bp, synthetic construct
  source 1..50: mol_type = other DNA; mol_type = other DNA
gcatggtggcatgtacctgtagtcccagctactcgggaggctgaggcagg

SEQ ID NO: 1978 - DNA, 50 bp, synthetic construct
  source 1..50: mol_type = other DNA; mol_type = other DNA
agaatggcatgaacccgggaggcagagcttgcagtaagccgagatcgcac

SEQ ID NO: 1979 - DNA, 50 bp, synthetic construct
  source 1..50: mol_type = other DNA; mol_type = other DNA
cactgcactccagcctgggcgacagagcaagactccatctcaaaacaaaa

SEQ ID NO: 1980 - DNA, 50 bp, synthetic construct
  source 1..50: mol_type = other DNA; mol_type = other DNA
aacaaaaaaacaaaacaaaaaaaacaggccaggtatggtggctcatgcct

SEQ ID NO: 1981 - DNA, 50 bp, synthetic construct
  source 1..50: mol_type = other DNA; mol_type = other DNA
gtaatctcagcactttgggaggccaaggtggaaggatcgcttgagcccag

SEQ ID NO: 1982 - DNA, 45 bp, synthetic construct
  source 1..45: mol_type = other DNA; mol_type = other DNA
gtgtttgagaccagcctgggcaacacagtgagaccccatctctac

SEQ ID NO: 1983 - DNA, 50 bp, synthetic construct
  source 1..50: mol_type = other DNA; mol_type = other DNA
gccaggtgtggtggctcacgcctataatcccagcactttgggaggctgag

SEQ ID NO: 1984 - DNA, 50 bp, synthetic construct
  source 1..50: mol_type = other DNA; mol_type = other DNA
gcaggaggatcgcttgagcccagtagtttgagaccagcctgggcaacaca

SEQ ID NO: 1985 - DNA, 19 bp, synthetic construct
  source 1..19: mol_type = other DNA; mol_type = other DNA
gtgagactccatctctata

SEQ ID NO: 1986 - DNA, 50 bp, synthetic construct
  source 1..50: mol_type = other DNA; mol_type = other DNA
ggccaggcgcagtggctcacacctgtaatcccagcactttgggttttttt

SEQ ID NO: 1987 - DNA, 50 bp, synthetic construct
  source 1..50: mol_type = other DNA; mol_type = other DNA
ggtttttgttttttgtttcgagacgggagttttgctcttgttgcccaggc

SEQ ID NO: 1988 - DNA, 50 bp, synthetic construct
  source 1..50: mol_type = other DNA
tggagtgcagatgcagtcttggctcactgcaagcttcgcctcccaggttc

SEQ ID NO: 1989 - DNA, 50 bp, synthetic construct
  source 1..50: mol_type = other DNA; mol_type = other DNA
aagtgattctcctgcctcaggctcccaagtagctgcgattacaggcacat

SEQ ID NO: 1990 - DNA, 50 bp, synthetic construct
  source 1..50: mol_type = other DNA; mol_type = other DNA
gccaccatgcccaactaatttttgtatttttagtagagaaggggtttcac

SEQ ID NO: 1991 - DNA, 50 bp, synthetic construct
  source 1..50: mol_type = other DNA; mol_type = other DNA
catgttggtcaggctggtctcaaactcctgacctcaggtaatccgcacac

SEQ ID NO: 1992 - DNA, 50 bp, synthetic construct
  source 1..50: mol_type = other DNA; mol_type = other DNA
ctcagcctcccaaagtgatgagattacaggcatgagccaccacacccggc

SEQ ID NO: 1993 - DNA, 50 bp, synthetic construct
  source 1..50: mol_type = other DNA; mol_type = other DNA
ctaatcccagcactttgggaggctgagatgggaggatcgcttgagcccag

SEQ ID NO: 1994 - DNA, 45 bp, synthetic construct
  source 1..45: mol_type = other DNA; mol_type = other DNA
gagttggagaccaccctgggcaacacagtgagacccccatctcta

SEQ ID NO: 1995 - DNA, 50 bp, synthetic construct
  source 1..50: mol_type = other DNA; mol_type = other DNA
tggtagctcatgcctgtaatcccagcactttgcggggctgaggtgggagg

SEQ ID NO: 1996 - DNA, 50 bp, synthetic construct
  source 1..50: mol_type = other DNA; mol_type = other DNA
atcgcttgagcccaggagtttgagaccagcctgggtaacacagtgagacc

SEQ ID NO: 1997 - DNA, 10 bp, synthetic construct
  source 1..10: mol_type = other DNA; mol_type = other DNA
ccatctctat

SEQ ID NO: 1998 - DNA, 50 bp, synthetic construct
  source 1..50: mol_type = other DNA; mol_type = other DNA
tggtggctcatgcctgtaatcccagcagtttgggaggctgaggtgggagg

SEQ ID NO: 1999 - DNA, 50 bp, synthetic construct
  source 1..50: mol_type = other DNA; mol_type = other DNA
atcgcttgagctcagggtttcaagaccagcctgggcaacacagtgagacc

SEQ ID NO: 2000 - DNA, 10 bp, synthetic construct
  source 1..10: mol_type = other DNA; mol_type = other DNA
ctatctctat

SEQ ID NO: 2001 - DNA, 50 bp, synthetic construct
  source 1..50: mol_type = other DNA; mol_type = other DNA
ggccaggttcggtggctcatgcctgaaatcccagcactttgggaggctaa

SEQ ID NO: 2002 - DNA, 50 bp, synthetic construct
  source 1..50: mol_type = other DNA; mol_type = other DNA
ggcgtgagggtcgcttgagcccaggagtttgagaccagcctgggtaacat

SEQ ID NO: 2003 - DNA, 19 bp, synthetic construct
  source 1..19: mol_type = other DNA; mol_type = other DNA
agtaagacccatctctacc

SEQ ID NO: 2004 - DNA, 50 bp, synthetic construct
  source 1..50: mol_type = other DNA; mol_type = other DNA
gggcaggtcatggtggctcatgcctgtaatccaaacacttttgggaggcc

SEQ ID NO: 2005 - DNA, 50 bp, synthetic construct
  source 1..50: mol_type = other DNA; mol_type = other DNA
aaggcgggaggatcgcttgagcccaggagttcaagaccagcctggggcaa

SEQ ID NO: 2006 - DNA, 15 bp, synthetic construct
  source 1..15: mol_type = other DNA; mol_type = other DNA
catagtgagacccag

SEQ ID NO: 2007 - DNA, 50 bp, synthetic construct
  source 1..50: mol_type = other DNA; mol_type = other DNA
ggccaggtgcagtggctcatgcctgtaatcccagcactttgggaggccca

SEQ ID NO: 2008 - DNA, 50 bp, synthetic construct
  source 1..50: mol_type = other DNA; mol_type = other DNA
ggtaggaggatcgcttgagcccaggagttggagaccagcctgggcaacac

SEQ ID NO: 2009 - DNA, 20 bp, synthetic construct
  source 1..20: mol_type = other DNA; mol_type = other DNA
agccagaccccatcttttaa

SEQ ID NO: 2010 - DNA, 20 bp, synthetic construct
  source 1..20: mol_type = other DNA; mol_type = other DNA
tgtgtaggcatgcagatata

SEQ ID NO: 2011 - DNA, 50 bp, synthetic construct
  source 1..50: mol_type = other DNA; mol_type = other DNA
atgaataaatgcattgtggtatatttacacaatgaaatagtatacagcac

SEQ ID NO: 2012 - DNA, 10 bp, synthetic construct
  source 1..10: mol_type = other DNA; mol_type = other DNA
tgaaaatgga

SEQ ID NO: 2013 - DNA, 50 bp, synthetic construct
  source 1..50: mol_type = other DNA; mol_type = other DNA
ataaacaaactgtggtatatttataaaatgatgtagtatacagtaatgaa

SEQ ID NO: 2014 - skipped

SEQ ID NO: 2015 - DNA, 50 bp, synthetic construct
  source 1..50: mol_type = other DNA; mol_type = other DNA
aataaacaaactgtggtatacacagacaatagaatagtattcagcgttaa

SEQ ID NO: 2016 - skipped

SEQ ID NO: 2017 - DNA, 43 bp, synthetic construct
  source 1..43: mol_type = other DNA; mol_type = other DNA
atgaataaacaaactgtggtatatttataccatgaaatagtac

SEQ ID NO: 2018 - DNA, 50 bp, synthetic construct
  source 1..50: mol_type = other DNA; mol_type = other DNA
ggtgctgtggctcacgcctgtaatcccagcacttcgggaggccgaggtgg

SEQ ID NO: 2019 - DNA, 50 bp, synthetic construct
  source 1..50: mol_type = other DNA; mol_type = other DNA
gcgaatcacctgaggtcgagttcgagactagcctggccaacatggcaaaa

SEQ ID NO: 2020 - DNA, 37 bp, synthetic construct
  source 1..37: mol_type = other DNA; mol_type = other DNA
cctcgtctctactaaaaatacaaaaattagctgggca

SEQ ID NO: 2021 - skipped

SEQ ID NO: 2022 - DNA, 18 bp, synthetic construct
  source 1..18: mol_type = other DNA; mol_type = other DNA
ggtggtggttgcctgtaa

SEQ ID NO: 2023 - DNA, 50 bp, synthetic construct
  source 1..50: mol_type = other DNA; mol_type = other DNA
tcccagccactcaggaggctgaggtgggagaatcatttgaacctgggagg

SEQ ID NO: 2024 - DNA, 50 bp, synthetic construct
  source 1..50: mol_type = other DNA; mol_type = other DNA
cagaggttgcagtgagtggagatcgcgccactgcaccccagcctgggcga

SEQ ID NO: 2025 - DNA, 50 bp, synthetic construct
  source 1..50: mol_type = other DNA; mol_type = other DNA
cacagtgagactttgtctcaaaaaaaaaaaaaaaaaaagaaagaaaagaa

SEQ ID NO: 2026 - DNA, 50 bp, synthetic construct
  source 1..50: mol_type = other DNA; mol_type = other DNA
aaacccgggaccagttctggtggctcacatccatagtcccggtataagag

SEQ ID NO: 2027 - DNA, 37 bp, synthetic construct
  source 1..37: mol_type = other DNA; mol_type = other DNA
gccgaggtgagaggatcacttgagcccaggagtttga

SEQ ID NO: 2028 - DNA, 50 bp, synthetic construct
  source 1..50: mol_type = other DNA; mol_type = other DNA
ggctgggtgcggtggctcatgcctgtaatctcagcactttggaaggctga

SEQ ID NO: 2029 - DNA, 50 bp, synthetic construct
  source 1..50: mol_type = other DNA; mol_type = other DNA
ggtgggcggaccacctgagatcaggagttcaagaccaatctggccaacat

SEQ ID NO: 2030 - DNA, 50 bp, synthetic construct
  source 1..50: mol_type = other DNA; mol_type = other DNA
ggtgaaaccccgtctttactaaaaatacaaaaattagccaggtgtggtgg

SEQ ID NO: 2031 - DNA, 50 bp, synthetic construct
  source 1..50: mol_type = other DNA; mol_type = other DNA
tgggtccctgtaatcccagctactctggaggctgaggcaggagaatcact

SEQ ID NO: 2032 - DNA, 50 bp, synthetic construct
  source 1..50: mol_type = other DNA; mol_type = other DNA
tgaatccgggaggaggaggttgcagtgaaccgagatggcgtcactgcact

SEQ ID NO: 2033 - DNA, 50 bp, synthetic construct
  source 1..50: mol_type = other DNA; mol_type = other DNA
ccagcctgcgcgacagagcgagactccatctcaaaaaaaaaaaaaaaaat

SEQ ID NO: 2034 - DNA, 50 bp, synthetic construct
  source 1..50: mol_type = other DNA; mol_type = other DNA
gctgggtgcggtggctcacgcctgtaatcctagcactttgggaggctgag

SEQ ID NO: 2035 - DNA, 50 bp, synthetic construct
  source 1..50: mol_type = other DNA; mol_type = other DNA
gcgggcagatcatgaggtcaggagattgagaccatcctggctaacacagt

SEQ ID NO: 2036 - DNA, 50 bp, synthetic construct
  source 1..50: mol_type = other DNA; mol_type = other DNA
gaaaccctgtccctactaaaaaaatacaaaaaattagctgggcgtggtgg

SEQ ID NO: 2037 - DNA, 50 bp, synthetic construct
  source 1..50: mol_type = other DNA; mol_type = other DNA
cacatgcctgtagtcccagctactcgggaggctgaggcaggagaatcact

SEQ ID NO: 2038 - DNA, 50 bp, synthetic construct
  source 1..50: mol_type = other DNA; mol_type = other DNA
tgaacctaggaggcggaggttgcagtaagccgagatcgtgccactgcact

SEQ ID NO: 2039 - DNA, 50 bp, synthetic construct
  source 1..50: mol_type = other DNA; mol_type = other DNA
ccagcctgggcaacagagcaagactcggtctcaaaaaaaaaaaaaaaaaa

SEQ ID NO: 2040 - DNA, 50 bp, synthetic construct
  source 1..50: mol_type = other DNA; mol_type = other DNA
ggctgggtgcggtggctcatgcctataatcctagcactttgggaggctga

SEQ ID NO: 2041 - DNA, 50 bp, synthetic construct
  source 1..50: mol_type = other DNA; mol_type = other DNA
ggtgggcgaatcacctgacgtcagcagttcgagaccagcctggccaacac

SEQ ID NO: 2042 - DNA, 50 bp, synthetic construct
  source 1..50: mol_type = other DNA; mol_type = other DNA
ggtgaaaccccgtctctactaaaaatacaaaaattagctgggcgtggtgg

SEQ ID NO: 2043 - DNA, 50 bp, synthetic construct
  source 1..50: mol_type = other DNA; mol_type = other DNA
cgggcgcctgtaatcccagctacgcgggaggctgaggtaggagaattgct

SEQ ID NO: 2044 - DNA, 50 bp, synthetic construct
  source 1..50: mol_type = other DNA; mol_type = other DNA
tgaacctaggagaatcgcttgaacctgggaggcggaggttgcagtgagcc

SEQ ID NO: 2045 - DNA, 50 bp, synthetic construct
  source 1..50: mol_type = other DNA; mol_type = other DNA
aagattgtgccactgtacttcagcctgggagacagaacgagactccatct

SEQ ID NO: 2046 - DNA, 10 bp, synthetic construct
  source 1..10: mol_type = other DNA; mol_type = other DNA
caaaaaaaat

SEQ ID NO: 2047 - DNA, 50 bp, synthetic construct
  source 1..50: mol_type = other DNA; mol_type = other DNA
ggctgggcgcggtggctcacgcctgtaatcccagcactttgggaggcaaa

SEQ ID NO: 2048 - DNA, 50 bp, synthetic construct
  source 1..50: mol_type = other DNA; mol_type = other DNA
ggtgggtggatcacctgaggtcaggagttcaagaccagtctggccaacat

SEQ ID NO: 2049 - DNA, 50 bp, synthetic construct
  source 1..50: mol_type = other DNA; mol_type = other DNA
ggtgaaacccagtctctactaaaaatacaaaaattagctgggcgtggtgg

SEQ ID NO: 2050 - DNA, 50 bp, synthetic construct
  source 1..50: mol_type = other DNA; mol_type = other DNA
catgcacctgtaatcctagctgctggggaggctgaggtggaagaattgct

SEQ ID NO: 2051 - DNA, 50 bp, synthetic construct
  source 1..50: mol_type = other DNA; mol_type = other DNA
tgaacccaggagacagaggttgcagtaaactgagatcaggctactgcatt

SEQ ID NO: 2052 - DNA, 48 bp, synthetic construct
  source 1..48: mol_type = other DNA; mol_type = other DNA
ccagccagggtgaaagagcgagactttgtctcaaggaaaaaaaaaaga

SEQ ID NO: 2053 - DNA, 50 bp, synthetic construct
  source 1..50: mol_type = other DNA; mol_type = other DNA
ggtggctcacacctgtaaccccagcactttgggaggccaaggcaggcaga

SEQ ID NO: 2054 - DNA, 50 bp, synthetic construct
  source 1..50: mol_type = other DNA; mol_type = other DNA
tcacctgaggtcaggagttcaagaccagcctggccaacatggcaaaagct

SEQ ID NO: 2055 - DNA, 50 bp, synthetic construct
  source 1..50: mol_type = other DNA; mol_type = other DNA
cgtctcaactaaaaatacaggctgggtgcggtggctcacacctgtaatcc

SEQ ID NO: 2056 - DNA, 50 bp, synthetic construct
  source 1..50: mol_type = other DNA; mol_type = other DNA
cagcactttgggaggcagaggcaggtggatcacgaggtcaaagttcaaga

SEQ ID NO: 2057 - DNA, 50 bp, synthetic construct
  source 1..50: mol_type = other DNA; mol_type = other DNA
ccagcctggccaagatggtgaaaccctgtctctactaaaaatacaaaaat

SEQ ID NO: 2058 - DNA, 50 bp, synthetic construct
  source 1..50: mol_type = other DNA; mol_type = other DNA
tagccaggtgctgtggcaggtgcctgtaatcccagctactcgggaggctg

SEQ ID NO: 2059 - DNA, 50 bp, synthetic construct
  source 1..50: mol_type = other DNA; mol_type = other DNA
aggcaggagaatcgcttgaacccagggcacagaggttgcagtgagccgag

SEQ ID NO: 2060 - DNA, 50 bp, synthetic construct
  source 1..50: mol_type = other DNA; mol_type = other DNA
atcatgccactgcattccagcctgggtgacagagtgagatgccatctaaa

SEQ ID NO: 2061 - DNA, 50 bp, synthetic construct
  source 1..50: mol_type = other DNA; mol_type = other DNA
aaaaataataataataattagccgggcatggtggctcctgtagtcccagc

SEQ ID NO: 2062 - DNA, 50 bp, synthetic construct
  source 1..50: mol_type = other DNA; mol_type = other DNA
tactagggaggtagaggttgcaggcagccgagatcacgccactgcactcc

SEQ ID NO: 2063 - DNA, 47 bp, synthetic construct
  source 1..47: mol_type = other DNA; mol_type = other DNA
agcctggatgacacagcgaggctctgtctcaaaaaaaagaaaaaggg

SEQ ID NO: 2064 - DNA, 50 bp, synthetic construct
  source 1..50: mol_type = other DNA; mol_type = other DNA
ttagctgggcatgatggcgcatgcctgtaatcctagctactcaggaggct

SEQ ID NO: 2065 - DNA, 50 bp, synthetic construct
  source 1..50: mol_type = other DNA; mol_type = other DNA
aaggcaggagattcgcttgaacccaggaggcagaggttgcagtgagctga

SEQ ID NO: 2066 - DNA, 50 bp, synthetic construct
  source 1..50: mol_type = other DNA; mol_type = other DNA
gattgtgccattgcactccagcctgggggacaagagtgaaactctgtctc

SEQ ID NO: 2067 - DNA, 20 bp, synthetic construct
  source 1..20: mol_type = other DNA; mol_type = other DNA
aaaaaaaaaaaaagaaaaaa

SEQ ID NO: 2068 - DNA, 50 bp, synthetic construct
  source 1..50: mol_type = other DNA; mol_type = other DNA
ttagctgggcatggtgatgcatgcctgtagtcccagctactcgggaggct

SEQ ID NO: 2069 - DNA, 50 bp, synthetic construct
  source 1..50: mol_type = other DNA; mol_type = other DNA
gaggcaggagaattgctagaacccaggaggcggaggttgcagtgagccga

SEQ ID NO: 2070 - DNA, 50 bp, synthetic construct
  source 1..50: mol_type = other DNA; mol_type = other DNA
gatcgcgctattgcactccagcctgggtgacaagagtgaaactccatctc

SEQ ID NO: 2071 - DNA, 20 bp, synthetic construct
  source 1..20: mol_type = other DNA; mol_type = other DNA
aaaaaaaaaaaaaaaaatag

SEQ ID NO: 2072 - DNA, 50 bp, synthetic construct
  source 1..50: mol_type = other DNA; mol_type = other DNA
ttagctgggcatggtgatgcatccctgtaattccagctactcaggaggct

SEQ ID NO: 2073 - DNA, 50 bp, synthetic construct
  source 1..50: mol_type = other DNA; mol_type = other DNA
aaggcaggagaatcacttgaacccgggaggcggaggttgtggtgagccaa

SEQ ID NO: 2074 - DNA, 50 bp, synthetic construct
  source 1..50: mol_type = other DNA; mol_type = other DNA
gatcgtgccagattgtgccactgcactccagcctgggcaacaagagcaaa

SEQ ID NO: 2075 - DNA, 30 bp, synthetic construct
  source 1..30: mol_type = other DNA; mol_type = other DNA
actccgtctcaaaaaaaggataaaataaaa

SEQ ID NO: 2076 - DNA, 50 bp, synthetic construct
  source 1..50: mol_type = other DNA; mol_type = other DNA
ttagctgggcatggtgatgcatccctgtaatcccagctactcaggaggct

SEQ ID NO: 2077 - DNA, 50 bp, synthetic construct; identical to SEQ ID NO: 2073
  source 1..50: mol_type = other DNA; mol_type = other DNA

SEQ ID NO: 2078 - DNA, 50 bp, synthetic construct
  source 1..50: mol_type = other DNA; mol_type = other DNA
gattgtgccagatagtgccactgtactccagcctgggcaacaagagcaaa

SEQ ID NO: 2079 - DNA, 30 bp, synthetic construct; identical to SEQ ID NO: 2075
  source 1..30: mol_type = other DNA; mol_type = other DNA

SEQ ID NO: 2080 - DNA, 50 bp, synthetic construct
  source 1..50: mol_type = other DNA; mol_type = other DNA
ttagctgggcatggtgatgcatgcctgtaatcccagctactcaggaggct

SEQ ID NO: 2081 - DNA, 50 bp, synthetic construct
  source 1..50: mol_type = other DNA; mol_type = other DNA
gaggcaggagaattgcttgaacccgggattgggaggttgcagtgagctga

SEQ ID NO: 2082 - DNA, 50 bp, synthetic construct
  source 1..50: mol_type = other DNA; mol_type = other DNA
gatcgtgctattgcactccagcctgggcaacaagagtgacactccatctc

SEQ ID NO: 2083 - DNA, 10 bp, synthetic construct
  source 1..10: mol_type = other DNA; mol_type = other DNA
aaaaaaaaat

SEQ ID NO: 2084 - DNA, 50 bp, synthetic construct
  source 1..50: mol_type = other DNA; mol_type = other DNA
ttagccgggcatggtgatgcatacctgtaatcctagctactcgggaggct

SEQ ID NO: 2085 - DNA, 50 bp, synthetic construct
  source 1..50: mol_type = other DNA; mol_type = other DNA
gaggcaggagaatcacttgaacccgggaggcagaggttgcagtgagcaga

SEQ ID NO: 2086 - DNA, 50 bp, synthetic construct
  source 1..50: mol_type = other DNA
gatcgtgccactacacgccagcctgggtgacaaagtgagactctgtctca

SEQ ID NO: 2087 - DNA, 50 bp, synthetic construct
  source 1..50: mol_type = other DNA
aaaaataaaaataaataaaacaaaaaataaaaaataaggcttggcgcggt

SEQ ID NO: 2088 - DNA, 50 bp, synthetic construct
  source 1..50: mol_type = other DNA
ggctcatgcctgtaatcccagcactttgggaggccgaggtgggaggatca

SEQ ID NO: 2089 - DNA, 50 bp, synthetic construct
  source 1..50: mol_type = other DNA; mol_type = other DNA
cgaggttaggagatcgagaccatcctggctaacacggtgaaacccgtctc

SEQ ID NO: 2090 - DNA, 50 bp, synthetic construct
  source 1..50: mol_type = other DNA; mol_type = other DNA
tactaaaaatacaaaaaattagccaggcgtggtggcgggcgcctatagtc

SEQ ID NO: 2091 - DNA, 50 bp, synthetic construct
  source 1..50: mol_type = other DNA; mol_type = other DNA
ccaactactcgggaggctgaggcagaagaatggcgtgaaccagggaggcg

SEQ ID NO: 2092 - DNA, 50 bp, synthetic construct
  source 1..50: mol_type = other DNA; mol_type = other DNA
gagcttgcagtgagccgagattgcaccactgcactccagcctgggtgaca

SEQ ID NO: 2093 - DNA, 50 bp, synthetic construct
  source 1..50: mol_type = other DNA; mol_type = other DNA
gagcgagactctgtctcaaaataaataaataaataaaataaaataaaata

SEQ ID NO: 2094 - DNA, 14 bp, synthetic construct
  source 1..14: mol_type = other DNA; mol_type = other DNA
taaaaaataaaaat

SEQ ID NO: 2095 - DNA, 50 bp, synthetic construct
  source 1..50: mol_type = other DNA; mol_type = other DNA
ttagctgggcatggtgatgtgtgcctgtaatcccagctactcaggaggct

SEQ ID NO: 2096 - DNA, 50 bp, synthetic construct
  source 1..50: mol_type = other DNA; mol_type = other DNA
aaggcaggagaatcacttgaacccaggaggcagagattgcagtaagccga

SEQ ID NO: 2097 - DNA, 50 bp, synthetic construct
  source 1..50: mol_type = other DNA; mol_type = other DNA
gatcgcgccactgcattccagcctgggcaacaagagcgaaactccgtctc

SEQ ID NO: 2098 - DNA, 12 bp, synthetic construct
  source 1..12: mol_type = other DNA; mol_type = other DNA
aaacaaataaat

SEQ ID NO: 2099 - DNA, 50 bp, synthetic construct
  source 1..50: mol_type = other DNA; mol_type = other DNA
gcctgtaatcccagcactttgggaggccgaggcaggtggatcacctgagg

SEQ ID NO: 2100 - DNA, 50 bp, synthetic construct
  source 1..50: mol_type = other DNA; mol_type = other DNA
tcaggagttggagaccagcctggctaacatggtgaaaccccgtttctact

SEQ ID NO: 2101 - DNA, 50 bp, synthetic construct
  source 1..50: mol_type = other DNA; mol_type = other DNA
aaaaatacaaaaagttagccaggtgtggtggtgagtgcccgtaatccgag

SEQ ID NO: 2102 - DNA, 50 bp, synthetic construct
  source 1..50: mol_type = other DNA; mol_type = other DNA
ctactcaggaggctgaggcaggagaatcgcttgaactgggaggcagaggt

SEQ ID NO: 2103 - DNA, 30 bp, synthetic construct
  source 1..30: mol_type = other DNA; mol_type = other DNA
tgcagtgagccgagattgtgccattgcatt

SEQ ID NO: 2104 - skipped

SEQ ID NO: 2105 - DNA, 40 bp, synthetic construct
  source 1..40: mol_type = other DNA; mol_type = other DNA
caacaagagcgaaactccgtctcaaaaaaaaaaaaaaaaa

SEQ ID NO: 2106 - DNA, 50 bp, synthetic construct
  source 1..50: mol_type = other DNA; mol_type = other DNA
tgcagtggctcatgcctgtaatcccagcacgttggggggcaggtggatca

SEQ ID NO: 2107 - DNA, 50 bp, synthetic construct
  source 1..50: mol_type = other DNA; mol_type = other DNA
cctaaggtcaggagtttgagaccagcctggccaacatggtgaaaccccat

SEQ ID NO: 2108 - DNA, 50 bp, synthetic construct
  source 1..50: mol_type = other DNA; mol_type = other DNA
ctctactaaaaatacaaaaattagccaggtgtggtggcgcgcacctgtaa

SEQ ID NO: 2109 - DNA, 50 bp, synthetic construct
  source 1..50: mol_type = other DNA; mol_type = other DNA
tcccagctactcgggaggctgaggcaggagaattgcttgaaccagggagg

SEQ ID NO: 2110 - DNA, 50 bp, synthetic construct
  source 1..50: mol_type = other DNA; mol_type = other DNA
cagaggttgcagtgagcccagattgtgccactgcactccagcctgggcaa

SEQ ID NO: 2111 - DNA, 50 bp, synthetic construct
  source 1..50: mol_type = other DNA; mol_type = other DNA
cagagtgagactttgtctcaaaaaaataaaagttaaaaaaaaaaatagaa

SEQ ID NO: 2112 - DNA, 50 bp, synthetic construct
  source 1..50: mol_type = other DNA; mol_type = other DNA
aaattaactgggcatggtggcatgtgcctgtagtcccagttactcaggtg

SEQ ID NO: 2113 - DNA, 50 bp, synthetic construct
  source 1..50: mol_type = other DNA; mol_type = other DNA
gctgaggcacaagaattgcttgaatccaggaggcggagattgcagtgagc

SEQ ID NO: 2114 - DNA, 50 bp, synthetic construct
  source 1..50: mol_type = other DNA; mol_type = other DNA
cgagattgtgccactgcactccagcctgggcaacagagcgagactctgtc

SEQ ID NO: 2115 - DNA, 10 bp, synthetic construct
  source 1..10: mol_type = other DNA; mol_type = other DNA
tcaagaagga

SEQ ID NO: 2116 - DNA, 50 bp, synthetic construct
  source 1..50: mol_type = other DNA; mol_type = other DNA
tgcagtggttcatgcctgtaatcccagcactttgggaggctgaggcagat

SEQ ID NO: 2117 - DNA, 50 bp, synthetic construct
  source 1..50: mol_type = other DNA; mol_type = other DNA
ggatcacttgaggtcaggagttcgagaccagcctgaccaacatggtgaaa

SEQ ID NO: 2118 - DNA, 50 bp, synthetic construct
  source 1..50: mol_type = other DNA; mol_type = other DNA
cccccatctctgctaaaaaaaatacaaaattagccaggtgtggtggcaca

SEQ ID NO: 2119 - DNA, 50 bp, synthetic construct
  source 1..50: mol_type = other DNA; mol_type = other DNA
cacctgtaatcccagctacttgggaggctgaggcaggagaatcacttgaa

SEQ ID NO: 2120 - DNA, 50 bp, synthetic construct
  source 1..50: mol_type = other DNA
tccgggaggtggaggttgcagtgagccaagattgtgccattgtactccag

SEQ ID NO: 2121 - DNA, 40 bp, synthetic construct
  source 1..40: mol_type = other DNA; mol_type = other DNA
cctgagcaacaagagtgaaactctgtctaaaaaaaaaaaa

SEQ ID NO: 2122 - DNA, 50 bp, synthetic construct
  source 1..50: mol_type = other DNA; mol_type = other DNA
gtggctcatgcctgtaatcccagcactttgggaggctgaggtgggtggat

SEQ ID NO: 2123 - DNA, 50 bp, synthetic construct
  source 1..50: mol_type = other DNA; mol_type = other DNA
cacctaaggtcaggagtttgagaccagcctggccaacatagtgaaacccc

SEQ ID NO: 2124 - DNA, 23 bp, synthetic construct
  source 1..23: mol_type = other DNA; mol_type = other DNA
atctctactaaaaatacaaaaag

SEQ ID NO: 2125 - skipped

SEQ ID NO: 2126 - DNA, 50 bp, synthetic construct
  source 1..50: mol_type = other DNA; mol_type = other DNA
tctctactaaaaatacaaaagttagccaggcgtggtggcatgtgcctgta

SEQ ID NO: 2127 - DNA, 50 bp, synthetic construct
  source 1..50: mol_type = other DNA; mol_type = other DNA
gtccaagctactctggaggttgaggcaggagaattgcttgaacctgggag

SEQ ID NO: 2128 - DNA, 50 bp, synthetic construct
  source 1..50: mol_type = other DNA; mol_type = other DNA
gcggaggttgctgtgagccgaagtcacaccattgcactccattgcactgg

SEQ ID NO: 2129 - DNA, 30 bp, synthetic construct
  source 1..30: mol_type = other DNA; mol_type = other DNA
gcaacaagagcaatactctgtctcaaaata

SEQ ID NO: 2130 - DNA, 50 bp, synthetic construct
  source 1..50: mol_type = other DNA; mol_type = other DNA
tcatgcctgtaatcccaacattttgggaggccgagttgggtggatcacct

SEQ ID NO: 2131 - DNA, 50 bp, synthetic construct
  source 1..50: mol_type = other DNA; mol_type = other DNA
aaggtcaggagttcgagaccagcctgactaacatggtgaaaccctgtctg

SEQ ID NO: 2132 - DNA, 50 bp, synthetic construct
  source 1..50: mol_type = other DNA; mol_type = other DNA
tagtaaatacaaaaagttagcctggtgtggtggcacgtgcctgtaatccc

SEQ ID NO: 2133 - DNA, 50 bp, synthetic construct
  source 1..50: mol_type = other DNA; mol_type = other DNA
agctacttgggaggctgaggcaggagaatcacttgaacccaggaggcgga

SEQ ID NO: 2134 - DNA, 50 bp, synthetic construct
  source 1..50: mol_type = other DNA; mol_type = other DNA
ggttgcagtgagccgagattgcaccattgcactccagcctgggcaacaag

SEQ ID NO: 2135 - DNA, 32 bp, synthetic construct
  source 1..32: mol_type = other DNA; mol_type = other DNA
agtgaaaactctgtctcaaaaaaaaaaaaaaa

SEQ ID NO: 2136 - DNA, 50 bp, synthetic construct
  source 1..50: mol_type = other DNA; mol_type = other DNA
gcctgtaatcccagcactttgggaggctgagctgagcggatcacctgagg

SEQ ID NO: 2137 - DNA, 50 bp, synthetic construct
  source 1..50: mol_type = other DNA; mol_type = other DNA
tcaagagttcgagaccagcctagccaacatggtgaaaccccgtctctact

SEQ ID NO: 2138 - DNA, 14 bp, synthetic construct
  source 1..14: mol_type = other DNA; mol_type = other DNA
aaaaatacaaaaaa

SEQ ID NO: 2139 - DNA, 50 bp, synthetic construct
  source 1..50: mol_type = other DNA; mol_type = other DNA
attagctgggcatggtggcacatgcctgcaatcgtagctacttgggaggc

SEQ ID NO: 2140 - DNA, 50 bp, synthetic construct
  source 1..50: mol_type = other DNA; mol_type = other DNA
tgaggcaggagaatcacttgaacctgggaggcagaggttgctgtgagcca

SEQ ID NO: 2141 - DNA, 50 bp, synthetic construct
  source 1..50: mol_type = other DNA; mol_type = other DNA
agattgtgccattgcactccagcctgggtgacggagtgagactgtctcga

SEQ ID NO: 2142 - DNA, 40 bp, synthetic construct
  source 1..40: mol_type = other DNA; mol_type = other DNA
aaaaaaaaaaaaaaatgccctatggacttaaaacaaaaga

SEQ ID NO: 2143 - DNA, 50 bp, synthetic construct
  source 1..50: mol_type = other DNA; mol_type = other DNA
ggctgggcacggtggctcacgcctgtaatcccagcactttgggaggccga

SEQ ID NO: 2144 - DNA, 50 bp, synthetic construct
  source 1..50: mol_type = other DNA; mol_type = other DNA
ggtgggcagatcacctgaggtcaggggttcgagaccagcctggccaacat

SEQ ID NO: 2145 - DNA, 34 bp, synthetic construct
  source 1..34: mol_type = other DNA; mol_type = other DNA
ggtgaaaccccatctctactaaaaatacaaaaat

SEQ ID NO: 2146 - DNA, 50 bp, synthetic construct
  source 1..50: mol_type = other DNA; mol_type = other DNA
ggctgggcacggtggctcacgcctgtaatcccagcactttaggaggccga

SEQ ID NO: 2147 - DNA, 50 bp, synthetic construct
  source 1..50: mol_type = other DNA; mol_type = other DNA
gggaggcagatcatgaggtcaaggagttcgagaccaccctggccaacatg

SEQ ID NO: 2148 - DNA, 31 bp, synthetic construct
  source 1..31: mol_type = other DNA; mol_type = other DNA
gtgaaaccccatctctactaaaaatacaaaa

SEQ ID NO: 2149 - DNA, 50 bp, synthetic construct
  source 1..50: mol_type = other DNA; mol_type = other DNA
ggctgggcatggtggctcacgcctgtaatcccagcagtttgggaggccga

SEQ ID NO: 2150 - DNA, 50 bp, synthetic construct
  source 1..50: mol_type = other DNA; mol_type = other DNA
gacgggcagatcacctgaggtcaggagttcgagaccaccctggccaacat

SEQ ID NO: 2151 - DNA, 38 bp, synthetic construct
  source 1..38: mol_type = other DNA; mol_type = other DNA
ggtgaaacgccatctctactaaaagaaaaaattatggc

SEQ ID NO: 2152 - DNA, 50 bp, synthetic construct
  source 1..50: mol_type = other DNA; mol_type = other DNA
gtctgggcatggtggctcacacctgtaattccagcactttaggagtctga

SEQ ID NO: 2153 - DNA, 50 bp, synthetic construct
  source 1..50: mol_type = other DNA; mol_type = other DNA
ggcgggcagatcacttgaggtcaggagttagagaccagcctggccaacat

SEQ ID NO: 2154 - DNA, 36 bp, synthetic construct
  source 1..36: mol_type = other DNA; mol_type = other DNA
ggcgaaaccccgtctctactaaaaatacaaaaacat

SEQ ID NO: 2155 - DNA, 50 bp, synthetic construct
  source 1..50: mol_type = other DNA; mol_type = other DNA
ggctgggcatggtggctcacgcctgtaatcccagcactttgggaggctga

SEQ ID NO: 2156 - DNA, 50 bp, synthetic construct
  source 1..50: mol_type = other DNA; mol_type = other DNA
ggcgagcggatcacctgaggtcaggagttaaagaccagcctgcccaacat

SEQ ID NO: 2157 - DNA, 38 bp, synthetic construct
  source 1..38: mol_type = other DNA; mol_type = other DNA
ggcgaaaccccgtctctactaaaagtacaaaaaattag

SEQ ID NO: 2158 - DNA, 50 bp, synthetic construct
  source 1..50: mol_type = other DNA; mol_type = other DNA
tttagagcactgaggtaatatgcaaaaacagtaatcatgtagttttaaaa

SEQ ID NO: 2159 - DNA, 50 bp, synthetic construct
  source 1..50: mol_type = other DNA; mol_type = other DNA
actaattctgggatgaaaggggaagtatgtaaacaactatgtgttgttaa

SEQ ID NO: 2160 - DNA, 50 bp, synthetic construct
  source 1..50: mol_type = other DNA; mol_type = other DNA
agatttataggagcattgtgacctgaccaaggacaaggaagtcctcagac

SEQ ID NO: 2161 - DNA, 50 bp, synthetic construct
  source 1..50: mol_type = other DNA; mol_type = other DNA
acacgctggtgcccagatgtctgcggctgtggatcagccctgcggtcatt

SEQ ID NO: 2162 - DNA, 50 bp, synthetic construct
  source 1..50: mol_type = other DNA; mol_type = other DNA
gatcccagcctctctctcttctccctgcccttaacataaaaagagcctga

SEQ ID NO: 2163 - DNA, 30 bp, synthetic construct
  source 1..30: mol_type = other DNA; mol_type = other DNA
aatttgtactgacttaagatggtaccttag

SEQ ID NO: 2164 - DNA, 50 bp, synthetic construct
  source 1..50: mol_type = other DNA; mol_type = other DNA
tttggagcactgagaaaatatgcaaaaacaacaatcatgtagtttttgca

SEQ ID NO: 2165 - DNA, 50 bp, synthetic construct
  source 1..50: mol_type = other DNA; mol_type = other DNA
acgaactctgggattaaagggaaagtatgtaaacaattaactatgttttg

SEQ ID NO: 2166 - DNA, 50 bp, synthetic construct
  source 1..50: mol_type = other DNA; mol_type = other DNA
ttaaagatttataggagtgttgtgacctgaccaaggacagagttgttccc

SEQ ID NO: 2167 - DNA, 50 bp, synthetic construct
  source 1..50: mol_type = other DNA
aacctcctcagaccctcattggcgtccagatgtctgcggtcgttggtcac

SEQ ID NO: 2168 - DNA, 50 bp, synthetic construct
  source 1..50: mol_type = other DNA; mol_type = other DNA
ctcttgatcccaaacctctcttcttccctctgtctttaacataaaaagag

SEQ ID NO: 2169 - DNA, 50 bp, synthetic construct
  source 1..50: mol_type = other DNA; mol_type = other DNA
cctgaaatttgtactgtcttaatatggtactttagaatgctagtccacca

SEQ ID NO: 2170 - DNA, 50 bp, synthetic construct
  source 1..50: mol_type = other DNA; mol_type = other DNA
tttagagtactattaatatgcaaaaacagcaatcatgtagttttaaaaac

SEQ ID NO: 2171 - DNA, 50 bp, synthetic construct
  source 1..50: mol_type = other DNA; mol_type = other DNA
taactctgggattaaaggagaagtatgtaaacaactatgtttttgttaaa

SEQ ID NO: 2172 - DNA, 50 bp, synthetic construct
  source 1..50: mol_type = other DNA; mol_type = other DNA
gatttataggagcgttgtgacctgaccaaggacaaagaagttccttgaac

SEQ ID NO: 2173 - DNA, 50 bp, synthetic construct
  source 1..50: mol_type = other DNA; mol_type = other DNA
acttgctggcacccagatgtcggtggttatctgttacctcttgatctcaa

SEQ ID NO: 2174 - DNA, 50 bp, synthetic construct
  source 1..50: mol_type = other DNA; mol_type = other DNA
tcccctccccttccttctgcccttaacataaaaagagcctaaaatttgta

SEQ ID NO: 2175 - DNA, 50 bp, synthetic construct
  source 1..50: mol_type = other DNA; mol_type = other DNA
ctgtctgaagatggtactttagaaggctagttccccatcttctcggtttc

SEQ ID NO: 2176 - DNA, 50 bp, synthetic construct
  source 1..50: mol_type = other DNA; mol_type = other DNA
ctggctttccaattaatcctgcttttcctcccaccaacacttgtctctcg

SEQ ID NO: 2177 - DNA, 17 bp, synthetic construct
  source 1..17: mol_type = other DNA; mol_type = other DNA
aatctggctttcaagca

SEQ ID NO: 2178 - DNA, 50 bp, synthetic construct
  source 1..50: mol_type = other DNA; mol_type = other DNA
tttggagcactgatataatctgaaaaaacagcaatcatgtagtttttttt

SEQ ID NO: 2179 - DNA, 50 bp, synthetic construct
  source 1..50: mol_type = other DNA; mol_type = other DNA
ttagacggaatctcactttgtcacccaggttggagtgcagtggcatgata

SEQ ID NO: 2180 - DNA, 50 bp, synthetic construct
  source 1..50: mol_type = other DNA; mol_type = other DNA
tcagctcactgcaacctccgcctcctggattcaagcaactctcctgcctc

SEQ ID NO: 2181 - DNA, 50 bp, synthetic construct
  source 1..50: mol_type = other DNA; mol_type = other DNA
agcctcccaaatagctgggattacaggcacctgccattacagccagctaa

SEQ ID NO: 2182 - DNA, 50 bp, synthetic construct
  source 1..50: mol_type = other DNA; mol_type = other DNA
tttttgtatttttagtagagatgggacttcaccatgttggccaggctggt

SEQ ID NO: 2183 - DNA, 50 bp, synthetic construct
  source 1..50: mol_type = other DNA; mol_type = other DNA
ctcgaactcctgacctcaggcaatctgcccacctcggcctcccaaagtgc

SEQ ID NO: 2184 - DNA, 50 bp, synthetic construct
  source 1..50: mol_type = other DNA; mol_type = other DNA
taggattacaggtgtgagccactgcacccggcctcatgtagtttttaaaa

SEQ ID NO: 2185 - DNA, 50 bp, synthetic construct
  source 1..50: mol_type = other DNA; mol_type = other DNA
ctaaccctgggattaaagaagtatgtagacaacttctatgtttttttaaa

SEQ ID NO: 2186 - DNA, 50 bp, synthetic construct
  source 1..50: mol_type = other DNA; mol_type = other DNA
gactatgtttttttaaagatttataggagcattgtgacctgaccaggaca

SEQ ID NO: 2187 - DNA, 50 bp, synthetic construct
  source 1..50: mol_type = other DNA; mol_type = other DNA
aagaagtttgcaacctcctcagacctttgctcatgcccagatatctgtgg

SEQ ID NO: 2188 - DNA, 50 bp, synthetic construct
  source 1..50: mol_type = other DNA; mol_type = other DNA
tcatcagacacttcttgatttcaacccccttcttttctccctgcccttaa

SEQ ID NO: 2189 - DNA, 46 bp, synthetic construct
  source 1..46: mol_type = other DNA; mol_type = other DNA
cataaaaagagcctacaatgtgtactgagttaagatggtactttag

SEQ ID NO: 2190 - DNA, 50 bp, synthetic construct
  source 1..50: mol_type = other DNA; mol_type = other DNA
tttagaccgctgagataatatgcaaaaacagcaatcatgtagtttttaaa

SEQ ID NO: 2191 - DNA, 50 bp, synthetic construct
  source 1..50: mol_type = other DNA; mol_type = other DNA
actaactctgggattaaagaagtatgtaaacaactatgttttgtcaaaga

SEQ ID NO: 2192 - DNA, 50 bp, synthetic construct
  source 1..50: mol_type = other DNA; mol_type = other DNA
ttttttttttttgagacacagtcttgctctgttgcccaggctagagtgtg

SEQ ID NO: 2193 - DNA, 50 bp, synthetic construct
  source 1..50: mol_type = other DNA
cagtggcacgatcttggcacattgcaacctccgcttcctgggttcaagcg

SEQ ID NO: 2194 - DNA, 50 bp, synthetic construct
  source 1..50: mol_type = other DNA
attctcctgcctcagcctcccgagtagctggaactacaggcgcccgccac

SEQ ID NO: 2195 - DNA, 50 bp, synthetic construct
  source 1..50: mol_type = other DNA
cacgcccggctaatttttgtatttttagtagagacggggtttcaccatct

SEQ ID NO: 2196 - DNA, 50 bp, synthetic construct
  source 1..50: mol_type = other DNA
tggccaggctggtctcgaactcctgacttcgtgatccacccacttcggcc

SEQ ID NO: 2197 - DNA, 50 bp, synthetic construct
  source 1..50: mol_type = other DNA
tctcaaagtgctgggattacaggtgtgagccaccacgcccagcctgtttt

SEQ ID NO: 2198 - DNA, 50 bp, synthetic construct
  source 1..50: mol_type = other DNA
ttcaaagatttataggggcattgtgacccaaccaaggacaaagaagtcat

SEQ ID NO: 2199 - DNA, 50 bp, synthetic construct
  source 1..50: mol_type = other DNA
caacctcctcggaccctagctggcactcagatgtctgcagtggtcacctc

SEQ ID NO: 2200 - DNA, 50 bp, synthetic construct
  source 1..50: mol_type = other DNA
cttatttttattattattacttttttatggagctagaaaccaggactata

SEQ ID NO: 2201 - DNA, 50 bp, synthetic construct
  source 1..50: mol_type = other DNA
gcctctacctcctgggctcgagtgatcctcctgcctcagcctcccaagta

SEQ ID NO: 2202 - DNA, 50 bp, synthetic construct
  source 1..50: mol_type = other DNA
gctgggactataggtgcatgccactatgcccagctagttttttattttat

SEQ ID NO: 2203 - DNA, 50 bp, synthetic construct
  source 1..50: mol_type = other DNA
ttattgttttgtagagatggggtctcactacattgccctggctggtcttg

SEQ ID NO: 2204 - DNA, 50 bp, synthetic construct
  source 1..50: mol_type = other DNA
aattcctgggttcaagtgatcctcctgcctcagcctcccaaagtgctgga

SEQ ID NO: 2205 - DNA, 50 bp, synthetic construct
  source 1..50: mol_type = other DNA
attggtatgagtcactgcgcctggcctgttggtcacctcttgatcacaat

SEQ ID NO: 2206 - DNA, 50 bp, synthetic construct
  source 1..50: mol_type = other DNA
gcccttctcttccctctgcccctaaaaaaaaaaaaaattgtactgattta

SEQ ID NO: 2207 - DNA, 50 bp, synthetic construct
  source 1..50: mol_type = other DNA
agatggtactttaggatgatagtccactgtgttctcggtttgctggctct

SEQ ID NO: 2208 - DNA, 30 bp, synthetic construct
  source 1..30: mol_type = other DNA
ccaaataaacttgcttttcctcccaccaac

SEQ ID NO: 2209 - DNA, 50 bp, synthetic construct
  source 1..50: mol_type = other DNA
ggcgcagtggctcacgcctgtaatcccagcactttgggaggccgaggtgg

SEQ ID NO: 2210 - DNA, 50 bp, synthetic construct
  source 1..50: mol_type = other DNA
gcggatcacctgaggtcgggagttcgagaccaacctgaccaatatggaga

SEQ ID NO: 2211 - DNA, 50 bp, synthetic construct
  source 1..50: mol_type = other DNA
aaccccgtctccactaaaaatacaaaattagccgggcctggtgacgggag

SEQ ID NO: 2212 - DNA, 50 bp, synthetic construct
  source 1..50: mol_type = other DNA
cctgtaatcccagctacttgggaggctgaggcaggagaatcatttgaacc

SEQ ID NO: 2213 - DNA, 50 bp, synthetic construct
  source 1..50: mol_type = other DNA
tgggaggcggaggttgcagtgagccgagatggcaccattgcactccagcc

SEQ ID NO: 2214 - DNA, 50 bp, synthetic construct
  source 1..50: mol_type = other DNA
tggtcagtaagagcgaaactccgtctcaaaaaaaagaaaaaaaaaaagaa

SEQ ID NO: 2215 - DNA, 10 bp, synthetic construct
  source 1..10: mol_type = other DNA
aagaaaaaag

SEQ ID NO: 2216 - DNA, 50 bp, synthetic construct
  source 1..50: mol_type = other DNA
ggccgggcgcagtggctcacacctgtaatcccagcactgtgggaggccga

SEQ ID NO: 2217 - DNA, 50 bp, synthetic construct
  source 1..50: mol_type = other DNA
ggtgggtggatcacctgaggtcgggagttcgagaccagcctgaccaatat

SEQ ID NO: 2218 - skipped

SEQ ID NO: 2219 - DNA, 50 bp, synthetic construct
  source 1..50: mol_type = other DNA
aaaacaccaccacaatgagattccacttcacatccattaggatggctatt

SEQ ID NO: 2220 - DNA, 50 bp, synthetic construct
  source 1..50: mol_type = other DNA
atttacataaagaaaaatcccagaaaataacaagtgttgacaaggatgtg

SEQ ID NO: 2221 - DNA, 50 bp, synthetic construct
  source 1..50: mol_type = other DNA
aagaaattggaacttttgtgccttgctggtgggaatgtaaaatggtgcag

SEQ ID NO: 2222 - DNA, 50 bp, synthetic construct
  source 1..50: mol_type = other DNA
ctgctatggaaaaaaacactactgagcttccttaaaaaattaaacataga

SEQ ID NO: 2223 - DNA, 50 bp, synthetic construct
  source 1..50: mol_type = other DNA
attttatgatccagcaattccctttctgggcatatacccaaaagaactga

SEQ ID NO: 2224 - DNA, 50 bp, synthetic construct
  source 1..50: mol_type = other DNA
aagcaggaactcaaatagatatttgtacaccaatatttgtagcagcatta

SEQ ID NO: 2225 - DNA, 35 bp, synthetic construct
  source 1..35: mol_type = other DNA; mol_type = other DNA
ttcacaatagccaaaaggtaaaaacaacccaagtt

SEQ ID NO: 2226 - DNA, 50 bp, synthetic construct
  source 1..50: mol_type = other DNA; mol_type = other DNA
aaaaccacaatgagataccacttcacactcactaggatggctataataaa

SEQ ID NO: 2227 - DNA, 50 bp, synthetic construct
  source 1..50: mol_type = other DNA; mol_type = other DNA
aaagataataacaagtgttagtgaggatgtggagaaattgcaaccctcat

SEQ ID NO: 2228 - DNA, 50 bp, synthetic construct
  source 1..50: mol_type = other DNA; mol_type = other DNA
aattgctggtgggaatgtaaaatggtgcagcctctgtggaaaacagtctg

SEQ ID NO: 2229 - DNA, 50 bp, synthetic construct
  source 1..50: mol_type = other DNA; mol_type = other DNA
gcagttcctcaaaagattaaacatagagttaccagcagtacatgaatgtt

SEQ ID NO: 2230 - DNA, 45 bp, synthetic construct
  source 1..45: mol_type = other DNA; mol_type = other DNA
tatagcagcattcataatagccaaaaagcagaaacaacccaaata

SEQ ID NO: 2231 - DNA, 50 bp, synthetic construct
  source 1..50: mol_type = other DNA; mol_type = other DNA
cacttcacacccattagggtgggtattatcaaaaaaaaaacaaaaaacaa

SEQ ID NO: 2232 - DNA, 50 bp, synthetic construct
  source 1..50: mol_type = other DNA; mol_type = other DNA
aaaacggaaaataacaactgttggcaaggctgtggggaaactggaacatg

SEQ ID NO: 2233 - DNA, 50 bp, synthetic construct
  source 1..50: mol_type = other DNA; mol_type = other DNA
ctgcattgttggtgggaatgtaagatggcatagcagctgtgcagaacagt

SEQ ID NO: 2234 - DNA, 50 bp, synthetic construct
  source 1..50: mol_type = other DNA; mol_type = other DNA
atggtgtcccctcaaaaaaattaggcataaaattagaacatgatccagca

SEQ ID NO: 2235 - DNA, 50 bp, synthetic construct
  source 1..50: mol_type = other DNA; mol_type = other DNA
attccactctgggtatataccggggacttgaacaaatatttgtacaccaa

SEQ ID NO: 2236 - DNA, 50 bp, synthetic construct
  source 1..50: mol_type = other DNA; mol_type = other DNA
tgttcatagcagcattattcacaatagccaaaaggtggaaacaacccaaa

SEQ ID NO: 2237 - DNA, 10 bp, synthetic construct
  source 1..10: mol_type = other DNA; mol_type = other DNA
tgtctattga

SEQ ID NO: 2238 - DNA, 50 bp, synthetic construct
  source 1..50: mol_type = other DNA; mol_type = other DNA
aaaccgcactctcggagacttcaggtgagatgaggtcaggttctcaggcc

SEQ ID NO: 2239 - DNA, 50 bp, synthetic construct
  source 1..50: mol_type = other DNA; mol_type = other DNA
aggtcctgaagtttgacaccttggcgaaatgcactttccttgactcagca

SEQ ID NO: 2240 - DNA, 50 bp, synthetic construct
  source 1..50: mol_type = other DNA; mol_type = other DNA
ccgcgagtgaggcggagccaagccccgagcagaagggttttcttcccagc

SEQ ID NO: 2241 - DNA, 43 bp, synthetic construct
  source 1..43: mol_type = other DNA; mol_type = other DNA
tgaagaggcagctcagcctagaccccaggcatggcactggaca

SEQ ID NO: 2242 - DNA, 50 bp, synthetic construct
  source 1..50: mol_type = other DNA; mol_type = other DNA
gcagaccagttgagtgcagactccagagtttcccaactgtgtgattttgt

SEQ ID NO: 2243 - DNA, 50 bp, synthetic construct
  source 1..50: mol_type = other DNA; mol_type = other DNA
ggaagtcatgtctccttcctgagcctcagtttccagttatagatttgggg

SEQ ID NO: 2244 - DNA, 36 bp, synthetic construct
  source 1..36: mol_type = other DNA; mol_type = other DNA
atgacagtaatttcttggagtaattgtggtggggat

SEQ ID NO: 2245 - DNA, 50 bp, synthetic construct
  source 1..50: mol_type = other DNA; mol_type = other DNA
ctcagacctctccttgggaactccagccttaaaaatccccctgcctaatc

SEQ ID NO: 2246 - DNA, 50 bp, synthetic construct
  source 1..50: mol_type = other DNA; mol_type = other DNA
cacacttccatctggatatccgatatgcatttcaaattttgcccaaacct

SEQ ID NO: 2247 - DNA, 50 bp, synthetic construct
  source 1..50: mol_type = other DNA; mol_type = other DNA
ggacacttaatctaccacccacaaacctagtcttctcaactccattcttg

SEQ ID NO: 2248 - DNA, 50 bp, synthetic construct
  source 1..50: mol_type = other DNA; mol_type = other DNA
caggagtcatccttagctccttgcttatctcacttcccacatgcaatcgt

SEQ ID NO: 2249 - DNA, 50 bp, synthetic construct
  source 1..50: mol_type = other DNA; mol_type = other DNA
gagtaaatactgctagctccatcttgaaaacatatatctagaattcaacc

SEQ ID NO: 2250 - DNA, 50 bp, synthetic construct
  source 1..50: mol_type = other DNA; mol_type = other DNA
accacttttcaccagctccactcactgggattattgcaatagcctcctaa

SEQ ID NO: 2251 - DNA, 50 bp, synthetic construct
  source 1..50: mol_type = other DNA; mol_type = other DNA
ttggtctccctccttctgccctttccctccagtaaccagcatgctcctgt

SEQ ID NO: 2252 - DNA, 50 bp, synthetic construct
  source 1..50: mol_type = other DNA; mol_type = other DNA
taaaatgtaaatcagatagtgatattcttctcttccgctcaagccctcca

SEQ ID NO: 2253 - DNA, 50 bp, synthetic construct
  source 1..50: mol_type = other DNA; mol_type = other DNA
gtgagatggctcaagccatctcagaatataatcctgtttctctctctctc

SEQ ID NO: 2254 - DNA, 50 bp, synthetic construct
  source 1..50: mol_type = other DNA; mol_type = other DNA
accccatttcccactatctcttttactcaccctgctgcagacatatgagc

SEQ ID NO: 2255 - DNA, 50 bp, synthetic construct
  source 1..50: mol_type = other DNA; mol_type = other DNA
ctccttgccatactttgaatctgccaaacatggtcctgcctcaggacttt

SEQ ID NO: 2256 - DNA, 50 bp, synthetic construct
  source 1..50: mol_type = other DNA; mol_type = other DNA
tgcacatgcttatccctctatctggccctacatatctccaggtatctgct

SEQ ID NO: 2257 - DNA, 50 bp, synthetic construct
  source 1..50: mol_type = other DNA; mol_type = other DNA
tccaattctcttcattcaggtctctgcttaaatgtagcagagaggccttc

SEQ ID NO: 2258 - DNA, 50 bp, synthetic construct
  source 1..50: mol_type = other DNA; mol_type = other DNA
tctaatcactccataatcttcatcactgtgtctccctgccttgctttttc

SEQ ID NO: 2259 - DNA, 50 bp, synthetic construct
  source 1..50: mol_type = other DNA; mol_type = other DNA
ttcataaggcttctaacctcctggcatcacatacttccttgcttatttgt

SEQ ID NO: 2260 - DNA, 50 bp, synthetic construct
  source 1..50: mol_type = other DNA; mol_type = other DNA
tcattgtctatcaccctgcttacattgacaatgtaagtgccatgtaagca

SEQ ID NO: 2261 - DNA, 50 bp, synthetic construct
  source 1..50: mol_type = other DNA; mol_type = other DNA
gagtcttggttttgttcattgctctagccccacacttggactggtacctg

SEQ ID NO: 2262 - DNA, 28 bp, synthetic construct
  source 1..28: mol_type = other DNA; mol_type = other DNA
ccacataatggatacctaacaatatgtg

SEQ ID NO: 2263 - DNA, 50 bp, synthetic construct
  source 1..50: mol_type = other DNA; mol_type = other DNA
ctgtccattctacctctaagacctgtctcaagtcagtccatccctagtgt

SEQ ID NO: 2264 - DNA, 50 bp, synthetic construct
  source 1..50: mol_type = other DNA; mol_type = other DNA
caccatcctggactaagctgtcacactgctgctctggatgaccacaataa

SEQ ID NO: 2265 - DNA, 50 bp, synthetic construct
  source 1..50: mol_type = other DNA; mol_type = other DNA
cctggctgccctcctcacttcctctgtagcctcagtataatccattcgtt

SEQ ID NO: 2266 - DNA, 50 bp, synthetic construct
  source 1..50: mol_type = other DNA; mol_type = other DNA
acatagcagcctgagtagacctttacaatgtaaatgggattatgccatcc

SEQ ID NO: 2267 - DNA, 50 bp, synthetic construct
  source 1..50: mol_type = other DNA; mol_type = other DNA
tcctgcttcaaactccccagcagcttcttgcatttagagtaaaatctcat

SEQ ID NO: 2268 - DNA, 50 bp, synthetic construct
  source 1..50: mol_type = other DNA; mol_type = other DNA
ctccatcccctggcctatcaggccctgcatgagctagcctcagcctgtgt

SEQ ID NO: 2269 - DNA, 50 bp, synthetic construct
  source 1..50: mol_type = other DNA; mol_type = other DNA
ctcttactacacctggaggcaccatccgttttgattgctctactccagtt

SEQ ID NO: 2270 - DNA, 50 bp, synthetic construct
  source 1..50: mol_type = other DNA; mol_type = other DNA
agcctgacctcctttcttgtcttctaacactctgaacaggatcctgcctt

SEQ ID NO: 2271 - DNA, 50 bp, synthetic construct
  source 1..50: mol_type = other DNA; mol_type = other DNA
ggagccttgtccttgctgctctaaactcatagcattatcccctgggcttt

SEQ ID NO: 2272 - DNA, 50 bp, synthetic construct
  source 1..50: mol_type = other DNA; mol_type = other DNA
tcccaagattgactgcattttatataatagatcttcttgcctccttggga

SEQ ID NO: 2273 - DNA, 50 bp, synthetic construct
  source 1..50: mol_type = other DNA; mol_type = other DNA
catcactgaccattccctctaagataactgccccccatactctggttcac

SEQ ID NO: 2274 - DNA, 50 bp, synthetic construct
  source 1..50: mol_type = other DNA; mol_type = other DNA
accaccctgttaatttccttccaggcactgccactctttataatcttctt

SEQ ID NO: 2275 - DNA, 50 bp, synthetic construct
  source 1..50: mol_type = other DNA; mol_type = other DNA
cattagtttgttcatgactgacttagccccatgaaggcaaagatgttttg

SEQ ID NO: 2276 - DNA, 50 bp, synthetic construct
  source 1..50: mol_type = other DNA; mol_type = other DNA
ttcacaatgacatttccaaaaaccatcacagtggcagtcacacagtaggc

SEQ ID NO: 2277 - DNA, 30 bp, synthetic construct
  source 1..30: mol_type = other DNA; mol_type = other DNA
acctgataaatgtccagtgaatgaatgagt

SEQ ID NO: 2278 - DNA, 50 bp, synthetic construct
  source 1..50: mol_type = other DNA; mol_type = other DNA
catctctatgcatatatttgaatgtcttgaactgtgacattaatgaagat

SEQ ID NO: 2279 - DNA, 15 bp, synthetic construct
  source 1..15: mol_type = other DNA; mol_type = other DNA
ggttgaatttcttca

SEQ ID NO: 2280 - DNA, 50 bp, synthetic construct
  source 1..50: mol_type = other DNA; mol_type = other DNA
ctcaaggctcagcagaaagccaggtgcatagtaggcactcaataaatatt

SEQ ID NO: 2281 - DNA, 20 bp, synthetic construct
  source 1..20: mol_type = other DNA; mol_type = other DNA
tcttgggcaaatgaatgaat

SEQ ID NO: 2282 - DNA, 50 bp, synthetic construct
  source 1..50: mol_type = other DNA; mol_type = other DNA
ttaattaaagagtactctgagattcccaggtgagctattcaaaccactta

SEQ ID NO: 2283 - DNA, 50 bp, synthetic construct
  source 1..50: mol_type = other DNA; mol_type = other DNA
tctatgcaaatctagattttccccaaatctgaataagcaagaaactacaa

SEQ ID NO: 2284 - DNA, 50 bp, synthetic construct
  source 1..50: mol_type = other DNA; mol_type = other DNA
aataaattggatgctgagacaagtgaatacaactttgctttttgtgcttt

SEQ ID NO: 2285 - DNA, 50 bp, synthetic construct
  source 1..50: mol_type = other DNA; mol_type = other DNA
gtgtttctaaaaacttcctcagggctgtcatcaagttgcctttacaataa

SEQ ID NO: 2286 - DNA, 50 bp, synthetic construct
  source 1..50: mol_type = other DNA; mol_type = other DNA
tgttctctctgccgggagcattcttccccagatgccacatggctaactcc

SEQ ID NO: 2287 - DNA, 50 bp, synthetic construct
  source 1..50: mol_type = other DNA; mol_type = other DNA
caagcctcttttaactctttgctcaaatgttaccttgccaacctgaccac

SEQ ID NO: 2288 - DNA, 50 bp, synthetic construct
  source 1..50: mol_type = other DNA; mol_type = other DNA
tctgtttaacactacagccgaccccaacctggcacctcaatcctgctcat

SEQ ID NO: 2289 - DNA, 50 bp, synthetic construct
  source 1..50: mol_type = other DNA; mol_type = other DNA
cttgttctgcttgtaatatttttctgcgtgtatcgccttctaacatctat

SEQ ID NO: 2290 - DNA, 50 bp, synthetic construct
  source 1..50: mol_type = other DNA; mol_type = other DNA
ataatttatttattattatgtgtattgcttattgtctgccctgccctgcc

SEQ ID NO: 2291 - DNA, 50 bp, synthetic construct
  source 1..50: mol_type = other DNA; mol_type = other DNA
cgcatgtcagttccacaggaacaaggaacatggtctgtttcattctccat

SEQ ID NO: 2292 - DNA, 36 bp, synthetic construct
  source 1..36: mol_type = other DNA; mol_type = other DNA
cacattcccagcacctgaataaatgtttgttgtata

SEQ ID NO: 2293 - DNA, 50 bp, synthetic construct
  source 1..50: mol_type = other DNA; mol_type = other DNA
caggagccatgcctgtctgtacccacagaatcctctgctcctagcagaag

SEQ ID NO: 2294 - DNA, 34 bp, synthetic construct
  source 1..34: mol_type = other DNA; mol_type = other DNA
cgattgtcccatagaaggtgctcaataattattt

SEQ ID NO: 2295 - DNA, 50 bp, synthetic construct
  source 1..50: mol_type = other DNA; mol_type = other DNA
ggccaggtgcgggtggctcatgcctgtaatcccagcactttgggaggctg

SEQ ID NO: 2296 - DNA, 50 bp, synthetic construct
  source 1..50: mol_type = other DNA; mol_type = other DNA
aggcaggtagatcacctgaggtcaggaattcgagaacagcctggccaaca

SEQ ID NO: 2297 - DNA, 50 bp, synthetic construct
  source 1..50: mol_type = other DNA; mol_type = other DNA
tggtgaaaccccatctctactaaaaacacacaaaaaatagccagacatgg

SEQ ID NO: 2298 - DNA, 50 bp, synthetic construct
  source 1..50: mol_type = other DNA; mol_type = other DNA
tggctcgcgcctgttgtcccagctactcaggaggctgaggcacgagaatc

SEQ ID NO: 2299 - DNA, 50 bp, synthetic construct
  source 1..50: mol_type = other DNA; mol_type = other DNA
gcttgaaccccggcagcaaaggttgcagtgagctgagatcgcgccactgc

SEQ ID NO: 2300 - DNA, 50 bp, synthetic construct
  source 1..50: mol_type = other DNA; mol_type = other DNA
actccagcctgggcgacagagcgagattctgtttcaattttttaaaaaag

SEQ ID NO: 2301 - skipped

SEQ ID NO: 2302 - DNA, 50 bp, synthetic construct
  source 1..50: mol_type = other DNA; mol_type = other DNA
agtggagagagcccggaccagagccagaagaccagggttttcacctcgct

SEQ ID NO: 2303 - DNA, 50 bp, synthetic construct
  source 1..50: mol_type = other DNA; mol_type = other DNA
gtgctgcaccctgctgcgtgaccctctctcagctctgtcccctcctgggt

SEQ ID NO: 2304 - DNA, 35 bp, synthetic construct
  source 1..35: mol_type = other DNA; mol_type = other DNA
cccactttcttcacatgtaggatggaggcgttgga

SEQ ID NO: 2305 - DNA, 50 bp, synthetic construct
  source 1..50: mol_type = other DNA; mol_type = other DNA
ggacttaggagtctaatacacctggattcaaatgctgtgtctgctcgtta

SEQ ID NO: 2306 - DNA, 50 bp, synthetic construct
  source 1..50: mol_type = other DNA; mol_type = other DNA
cttaccttgggtaagtcacttcccctctccgtgtctcatttttcccagct

SEQ ID NO: 2307 - DNA, 50 bp, synthetic construct
  source 1..50: mol_type = other DNA; mol_type = other DNA
gtcaaatgtgactggttctagcacctacggaggatgtaagggttcagttg

SEQ ID NO: 2308 - DNA, 50 bp, synthetic construct
  source 1..50: mol_type = other DNA; mol_type = other DNA
tcaaggtatacacagtgcttgcatcatgcctgtctcagggtgcacagtag

SEQ ID NO: 2309 - skipped

SEQ ID NO: 2310 - DNA, 50 bp, synthetic construct
  source 1..50: mol_type = other DNA; mol_type = other DNA
tagaagcaagagataagcatttctgtcccagaacctccatatctaagcat

SEQ ID NO: 2311 - DNA, 50 bp, synthetic construct
  source 1..50: mol_type = other DNA; mol_type = other DNA
atgtgaaccctgggcaagtggcttaccctctctgggcctcaggttccaac

SEQ ID NO: 2312 - DNA, 27 bp, synthetic construct
  source 1..27: mol_type = other DNA; mol_type = other DNA
accatgcaacgaggataaatgccactg

SEQ ID NO: 2313 - DNA, 50 bp, synthetic construct
  source 1..50: mol_type = other DNA; mol_type = other DNA
aacaccatggggatgcaatctgaaaatcccagactataacaaactgcaga

SEQ ID NO: 2314 - DNA, 50 bp, synthetic construct
  source 1..50: mol_type = other DNA; mol_type = other DNA
acaagcaacccagtttcccagtttttaaaagtaaataaatcgcaagggga

SEQ ID NO: 2315 - DNA, 50 bp, synthetic construct
  source 1..50: mol_type = other DNA; mol_type = other DNA
aaaaagatacggagggaaacttatatgtaaaaagacagatcaaccaatca

SEQ ID NO: 2316 - DNA, 50 bp, synthetic construct
  source 1..50: mol_type = other DNA; mol_type = other DNA
caattgtggtgcagacctgtttggatcctgattcaaacaaacaaacaaaa

SEQ ID NO: 2317 - DNA, 50 bp, synthetic construct
  source 1..50: mol_type = other DNA; mol_type = other DNA
tttatgagacaaatggaaatctgcctggatatttgctggcataaggaatt

SEQ ID NO: 2318 - DNA, 50 bp, synthetic construct
  source 1..50: mol_type = other DNA; mol_type = other DNA
actattactttttctagtatgctaatgatactgtgcttatgttttaaaaa

SEQ ID NO: 2319 - DNA, 50 bp, synthetic construct
  source 1..50: mol_type = other DNA; mol_type = other DNA
gaagtccctatgttttagatatgcataatcaaatatatacaaatgaaatt

SEQ ID NO: 2320 - DNA, 22 bp, synthetic construct
  source 1..22: mol_type = other DNA; mol_type = other DNA
acaagatgtctgaaatttgctt

SEQ ID NO: 2321 - DNA, 50 bp, synthetic construct
  source 1..50: mol_type = other DNA; mol_type = other DNA
ggcacacgcctgtaatcccagcactttgggaggccgaggcgggtggatca

SEQ ID NO: 2322 - DNA, 50 bp, synthetic construct
  source 1..50: mol_type = other DNA; mol_type = other DNA
ggaggtcaggagatcgagaccatccttgctaacacagtgaaaccccgtct

SEQ ID NO: 2323 - DNA, 50 bp, synthetic construct
  source 1..50: mol_type = other DNA; mol_type = other DNA
ctgctaaaaactacaaaaaaaattagccgggcgtggtggcgggcacctgt

SEQ ID NO: 2324 - DNA, 50 bp, synthetic construct
  source 1..50: mol_type = other DNA; mol_type = other DNA
agtcccagctactcaggaggctgaggcaggagaatggagtgaacccggga

SEQ ID NO: 2325 - DNA, 50 bp, synthetic construct
  source 1..50: mol_type = other DNA; mol_type = other DNA
ggcagagcttgcagtgagccgagatcgcgccactgcactgcagcctgggt

SEQ ID NO: 2326 - DNA, 50 bp, synthetic construct
  source 1..50: mol_type = other DNA; mol_type = other DNA
gacagagcaagacttcgtctcaaaaaacaaacaaacaaacaaacaaacaa

SEQ ID NO: 2327 - DNA, 50 bp, synthetic construct
  source 1..50: mol_type = other DNA; mol_type = other DNA
ctctctgtcctcatgtctcagtttcctcatctgtaaggatgtattatatg

SEQ ID NO: 2328 - DNA, 50 bp, synthetic construct
  source 1..50: mol_type = other DNA; mol_type = other DNA
aatgaaatatataaacataagtaaagaatgtaaaacagcaaaaacagtaa

SEQ ID NO: 2329 - DNA, 29 bp, synthetic construct
  source 1..29: mol_type = other DNA; mol_type = other DNA
gtggctccataattgttgctattattatt

SEQ ID NO: 2330 - DNA, 50 bp, synthetic construct
  source 1..50: mol_type = other DNA; mol_type = other DNA
tgttatggactaaattgtgtcctcacctggaaattcataggttgaagccg

SEQ ID NO: 2331 - DNA, 50 bp, synthetic construct
  source 1..50: mol_type = other DNA; mol_type = other DNA
taatccccaatgtgagtgtatctggagatagggcctttaaggaggtcatt

SEQ ID NO: 2332 - DNA, 50 bp, synthetic construct
  source 1..50: mol_type = other DNA; mol_type = other DNA
aaagttaattaaaatcataaaagtggggccctaatccaatatgacaggtg

SEQ ID NO: 2333 - DNA, 50 bp, synthetic construct
  source 1..50: mol_type = other DNA; mol_type = other DNA
tcctaacaagaacagagacaccagggatgtgcatgcacagagaaaaggtc

SEQ ID NO: 2334 - DNA, 50 bp, synthetic construct
  source 1..50: mol_type = other DNA; mol_type = other DNA
atgtgagtacacagtgagaaggtggctgtctgcaagccatggagagaggc

SEQ ID NO: 2335 - DNA, 50 bp, synthetic construct
  source 1..50: mol_type = other DNA; mol_type = other DNA
ctcaggagaaataaccttgctagcaccttgaccttggtcttccagactcc

SEQ ID NO: 2336 - DNA, 50 bp, synthetic construct
  source 1..50: mol_type = other DNA; mol_type = other DNA
agaactgtgagaaaatatatttctagattgaagccacccagtctgtagta

SEQ ID NO: 2337 - DNA, 33 bp, synthetic construct
  source 1..33: mol_type = other DNA; mol_type = other DNA
ttttgttatgggctgcccaagctgactgatata

SEQ ID NO: 2338 - DNA, 50 bp, synthetic construct
  source 1..50: mol_type = other DNA; mol_type = other DNA
aaatcattatataggtgtgccgtgcagttaataaaaatatgaagcttttt

SEQ ID NO: 2339 - DNA, 50 bp, synthetic construct
  source 1..50: mol_type = other DNA; mol_type = other DNA
tctgtatttttaaatatttgtagtatatgtcagcttcttaaaatttatat

SEQ ID NO: 2340 - DNA, 50 bp, synthetic construct
  source 1..50: mol_type = other DNA; mol_type = other DNA
ttggtcttgagtccttttctaagtctaaataaatattcacttttgtatcc

SEQ ID NO: 2341 - DNA, 50 bp, synthetic construct
  source 1..50: mol_type = other DNA; mol_type = other DNA
aactttgtattcttttttgctttctttttttaaaagagtgacccccaaaa

SEQ ID NO: 2342 - DNA, 41 bp, synthetic construct
  source 1..41: mol_type = other DNA; mol_type = other DNA
cttccaggcttcaggccctacacaccctggacccacctctg

SEQ ID NO: 2343 - DNA, 50 bp, synthetic construct
  source 1..50: mol_type = other DNA; mol_type = other DNA
tggtagacagaagaatggctcttcctcaaaatgtgcacatcctaatccct

SEQ ID NO: 2344 - DNA, 50 bp, synthetic construct
  source 1..50: mol_type = other DNA; mol_type = other DNA
agaacctgtgaaaacattacgttacaaggcaaaaaggactttgcagatgt

SEQ ID NO: 2345 - DNA, 50 bp, synthetic construct
  source 1..50: mol_type = other DNA; mol_type = other DNA
ggatgggaagattatcctggattcccgaggtgggtccaatgtattcacag

SEQ ID NO: 2346 - DNA, 50 bp, synthetic construct
  source 1..50: mol_type = other DNA; mol_type = other DNA
gagtccttataagggaaagaaggaggcaggtaagtcagagtcagagagga

SEQ ID NO: 2347 - DNA, 50 bp, synthetic construct
  source 1..50: mol_type = other DNA; mol_type = other DNA
aaatgtagctatggaagcagaggttggagtgatgtggccatgagccaagg

SEQ ID NO: 2348 - DNA, 50 bp, synthetic construct
  source 1..50: mol_type = other DNA; mol_type = other DNA
aatgcaggtagcttctagaagccagaaaaggcagggaatgaattatcctc

SEQ ID NO: 2349 - DNA, 50 bp, synthetic construct
  source 1..50: mol_type = other DNA; mol_type = other DNA
tagagccttcagaaggagcactgctctgccaaccttgatcttagccctct

SEQ ID NO: 2350 - DNA, 50 bp, synthetic construct
  source 1..50: mol_type = other DNA; mol_type = other DNA
gaggatcaattcagacttctgacctctggaattgtaagatgataagtctg

SEQ ID NO: 2351 - DNA, 50 bp, synthetic construct
  source 1..50: mol_type = other DNA; mol_type = other DNA
aattgcttcaagccgttaagtttgtagcaatttgtttgagcagcaatggg

SEQ ID NO: 2352 - DNA, 11 bp, synthetic construct
  source 1..11: mol_type = other DNA; mol_type = other DNA
aaactaatata

SEQ ID NO: 2353 - DNA, 50 bp, synthetic construct
  source 1..50: mol_type = other DNA; mol_type = other DNA
ggctgggcatggtggctcacacctggaattccagcatttcaggaggccaa

SEQ ID NO: 2354 - DNA, 50 bp, synthetic construct
  source 1..50: mol_type = other DNA; mol_type = other DNA
ggtgggaggattgcttgaggtgatccagcttgagtttgagaccaacctgg

SEQ ID NO: 2355 - DNA, 50 bp, synthetic construct
  source 1..50: mol_type = other DNA; mol_type = other DNA
ttttgagcctgggtcttgagtttgagaacagcctggcaacatagtgagac

SEQ ID NO: 2356 - DNA, 50 bp, synthetic construct
  source 1..50: mol_type = other DNA; mol_type = other DNA
cctatctttactaaaaataaaaatattagctgggcgtggtagtaagcacc

SEQ ID NO: 2357 - DNA, 50 bp, synthetic construct
  source 1..50: mol_type = other DNA; mol_type = other DNA
tgtagtctcatctacttgggaggctgaagtgggaagatggcttgagcctg

SEQ ID NO: 2358 - DNA, 50 bp, synthetic construct
  source 1..50: mol_type = other DNA; mol_type = other DNA
ggttgaggatgcagtgagctgtgatagtgccactgcactccagcctgggt

SEQ ID NO: 2359 - DNA, 21 bp, synthetic construct
  source 1..21: mol_type = other DNA; mol_type = other DNA
gacagagtaagactctctctc

SEQ ID NO: 2360 - DNA, 50 bp, synthetic construct
  source 1..50: mol_type = other DNA; mol_type = other DNA
tgtggtggaccaattatattaatgaatctagttcttcactcctcctcgta

SEQ ID NO: 2361 - DNA, 50 bp, synthetic construct
  source 1..50: mol_type = other DNA; mol_type = other DNA
ttcataccctttgccttatgattttgcaactcttcatatcaggaggcata

SEQ ID NO: 2362 - DNA, 50 bp, synthetic construct
  source 1..50: mol_type = other DNA; mol_type = other DNA
ttgtgtatttctccatgtctcagttctgagttcagccatgtaacttgttt

SEQ ID NO: 2363 - DNA, 50 bp, synthetic construct
  source 1..50: mol_type = other DNA; mol_type = other DNA
tgacccatgagatattaacatatatgaatcaggcagaggtttgggaaatg

SEQ ID NO: 2364 - DNA, 50 bp, synthetic construct
  source 1..50: mol_type = other DNA; mol_type = other DNA
tgcttatgtttctgcttgcacttttgcaccactaccattaccatgaaaac

SEQ ID NO: 2365 - DNA, 50 bp, synthetic construct
  source 1..50: mol_type = other DNA; mol_type = other DNA
acgcctaggctagcctgctagaggtgaggcctgtggagcgcagctgagtc

SEQ ID NO: 2366 - DNA, 50 bp, synthetic construct
  source 1..50: mol_type = other DNA; mol_type = other DNA
gcccagttccccagccaagaccagcctgagccagtaaagtacagcatgtg

SEQ ID NO: 2367 - DNA, 50 bp, synthetic construct
  source 1..50: mol_type = other DNA; mol_type = other DNA
agtgagcccagcagagcctaggaaaacagcccaatctaaatagccaactg

SEQ ID NO: 2368 - DNA, 50 bp, synthetic construct
  source 1..50: mol_type = other DNA; mol_type = other DNA
cagactcagaaactaaaggcttattgtttgaagccactggattttggaga

SEQ ID NO: 2369 - DNA, 45 bp, synthetic construct
  source 1..45: mol_type = other DNA; mol_type = other DNA
gcggcttattacacataattatcacggtaatagataacagataca

SEQ ID NO: 2370 - DNA, 50 bp, synthetic construct
  source 1..50: mol_type = other DNA; mol_type = other DNA
caggggacctctgacttgagatcagcagaataaacacaagtcgagtcagg

SEQ ID NO: 2371 - DNA, 50 bp, synthetic construct
  source 1..50: mol_type = other DNA; mol_type = other DNA
tagaaaaggtggagtagtgttttggccttggagagacatgggttcaagtc

SEQ ID NO: 2372 - DNA, 50 bp, synthetic construct
  source 1..50: mol_type = other DNA; mol_type = other DNA
ccaactctgccacctactagctgaatagcttccctgagcctctgtttcct

SEQ ID NO: 2373 - DNA, 50 bp, synthetic construct
  source 1..50: mol_type = other DNA; mol_type = other DNA
cctctgtaaaactgggatagtaatagcattaccttggcgagctaatgtga

SEQ ID NO: 2374 - skipped

SEQ ID NO: 2375 - DNA, 50 bp, synthetic construct
  source 1..50: mol_type = other DNA; mol_type = other DNA
gaggggctgaggagggcctgaggccttggagagggaactgggaggcctgg

SEQ ID NO: 2376 - DNA, 32 bp, synthetic construct
  source 1..32: mol_type = other DNA; mol_type = other DNA
cttctagcccggctctgcctctgaccctctgg

SEQ ID NO: 2377 - DNA, 50 bp, synthetic construct
  source 1..50: mol_type = other DNA; mol_type = other DNA
tttcaaactgtgttctctggagtcctgggccattcagaagtgctataggg

SEQ ID NO: 2378 - DNA, 26 bp, synthetic construct
  source 1..26: mol_type = other DNA; mol_type = other DNA
attccacaaatgttggatcagaattt

SEQ ID NO: 2379 - DNA, 50 bp, synthetic construct
  source 1..50: mol_type = other DNA; mol_type = other DNA
actttataagaaataacagtaatccatgtgaacttataaatgaatttatg

SEQ ID NO: 2380 - DNA, 50 bp, synthetic construct
  source 1..50: mol_type = other DNA; mol_type = other DNA
gcaataaaatggcccctctgtctgctttatgtatcagggtttcacctaag

SEQ ID NO: 2381 - DNA, 40 bp, synthetic construct
  source 1..40: mol_type = other DNA; mol_type = other DNA
aatttatctgaagacaggattctgctcctaaataagtttg

SEQ ID NO: 2382 - DNA, 50 bp, synthetic construct
  source 1..50: mol_type = other DNA; mol_type = other DNA
ttcctcatctataaaatatgactaaaaatatccatctggcaagattaagg

SEQ ID NO: 2383 - DNA, 50 bp, synthetic construct
  source 1..50: mol_type = other DNA; mol_type = other DNA
ggatgtatgtaaagtgcctggcacagagcagaagttggcatcagtagtag

SEQ ID NO: 2384 - skipped

SEQ ID NO: 2385 - DNA, 50 bp, synthetic construct
  source 1..50: mol_type = other DNA; mol_type = other DNA
gcacagcagggtagttacacacatgggctcaggagcccaagtgctggggt

SEQ ID NO: 2386 - DNA, 50 bp, synthetic construct
  source 1..50: mol_type = other DNA; mol_type = other DNA
tcaaatctcagctcttacttgctctgtgaccttaggacactaatatttct

SEQ ID NO: 2387 - DNA, 41 bp, synthetic construct
  source 1..41: mol_type = other DNA; mol_type = other DNA
gtctcagtttcctcatctataaaatgggcatgataataata

SEQ ID NO: 2388 - DNA, 50 bp, synthetic construct
  source 1..50: mol_type = other DNA; mol_type = other DNA
aggagagcagcgcctgaggtcagcactggaggacaagggcatggaaagat

SEQ ID NO: 2389 - DNA, 50 bp, synthetic construct
  source 1..50: mol_type = other DNA; mol_type = other DNA
gtggggtgtgaatcttggctctgccactgaccagtcaggtgaccttggac

SEQ ID NO: 2390 - DNA, 50 bp, synthetic construct
  source 1..50: mol_type = other DNA; mol_type = other DNA
aagggatatagcctctctgaatttctattgcctcatcagaaagatgagga

SEQ ID NO: 2391 - DNA, 50 bp, synthetic construct
  source 1..50: mol_type = other DNA; mol_type = other DNA
tggtaatatctacgcttcaggattgatttaggattaaacagacaatgcac

SEQ ID NO: 2392 - DNA, 50 bp, synthetic construct
  source 1..50: mol_type = other DNA; mol_type = other DNA
atacagtgtcaaatactgtgcaaaggaagacaataagtgcttagtatatg

SEQ ID NO: 2393 - DNA, 11 bp, synthetic construct
  source 1..11: mol_type = other DNA; mol_type = other DNA
gtagctgtatt

SEQ ID NO: 2394 - DNA, 50 bp, synthetic construct
  source 1..50: mol_type = other DNA; mol_type = other DNA
caccttggcgaaatgcagggtggctgtctttctttcttgactcatttctt

SEQ ID NO: 2395 - DNA, 49 bp, synthetic construct
  source 1..49: mol_type = other DNA; mol_type = other DNA
gtgtaagtcatgtggcctcaggcaggttactctaccttcctgagcctca

SEQ ID NO: 2396 - DNA, 10 bp, synthetic construct
  source 1..10: mol_type = other DNA; mol_type = other DNA
gtttccttct

SEQ ID NO: 2397 - DNA, 50 bp, synthetic construct
  source 1..50: mol_type = other DNA; mol_type = other DNA
tcatgtctcctccttctccatctttcagatggagagacagaggcacaaac

SEQ ID NO: 2398 - DNA, 50 bp, synthetic construct
  source 1..50: mol_type = other DNA; mol_type = other DNA
atcattcacggtcaagagcacaggctttggggttagataacactcgttcc

SEQ ID NO: 2399 - DNA, 40 bp, synthetic construct
  source 1..40: mol_type = other DNA; mol_type = other DNA
ttgggcatgtcactttcctgagcctcagtttctccaacgg

SEQ ID NO: 2400 - DNA, 29 bp, synthetic construct
  source 1..29: mol_type = other DNA; mol_type = other DNA
aagtcactccttcctgagcctcagtttct

SEQ ID NO: 2401 - DNA, 27 bp, synthetic construct
  source 1..27: mol_type = other DNA; mol_type = other DNA
catgtctcttcctgagcctcagtttcc

SEQ ID NO: 2402 - DNA, 30 bp, synthetic construct
  source 1..30: mol_type = other DNA; mol_type = other DNA
atgtcaccttcctgagcctcagtttcccca

SEQ ID NO: 2403 - DNA, 21 bp, synthetic construct
  source 1..21: mol_type = other DNA; mol_type = other DNA
ccttcctgagcctcagtttcc

SEQ ID NO: 2404 - DNA, 21 bp, synthetic construct
  source 1..21: mol_type = other DNA; mol_type = other DNA
tccttcctgagcctcagtttc

SEQ ID NO: 2405 - DNA, 50 bp, synthetic construct
  source 1..50: mol_type = other DNA; mol_type = other DNA
cttcattcaggtctctgcttaaatatcaccttttcagaacgcttatcttg

SEQ ID NO: 2406 - DNA, 50 bp, synthetic construct
  source 1..50: mol_type = other DNA; mol_type = other DNA
accacacactaatagacagccactttacaacataacactgaatctttcta

SEQ ID NO: 2407 - DNA, 50 bp, synthetic construct
  source 1..50: mol_type = other DNA; mol_type = other DNA
gctggttgcctttttcttcatagtacttgttgctacctagaaatgtactt

SEQ ID NO: 2408 - DNA, 50 bp, synthetic construct
  source 1..50: mol_type = other DNA; mol_type = other DNA
tgtattgttggtcttcctcaccaaagtatagggctgtgagggttggtgtc

SEQ ID NO: 2409 - DNA, 50 bp, synthetic construct
  source 1..50: mol_type = other DNA; mol_type = other DNA
ttatctgttttcttcactgcttcattcccagggttcaggaaggttgggta

SEQ ID NO: 2410 - DNA, 50 bp, synthetic construct
  source 1..50: mol_type = other DNA; mol_type = other DNA
tccagtaggtactcaaacttttgttaaattagttaatttagcatatatgg

SEQ ID NO: 2411 - DNA, 50 bp, synthetic construct
  source 1..50: mol_type = other DNA; mol_type = other DNA
tgtgccagacattattattattatctgagacagcgtttcactctgtcacc

SEQ ID NO: 2412 - DNA, 50 bp, synthetic construct
  source 1..50: mol_type = other DNA
aaggctggagtacagtggcatgaccatggctcactgaaacctcctggcct

SEQ ID NO: 2413 - DNA, 10 bp, synthetic construct
  source 1..10: mol_type = other DNA
cactgcagcc

SEQ ID NO: 2414 - DNA, 50 bp, synthetic construct
  source 1..50: mol_type = other DNA
ggattattacaatagcctcctaattggtctccagcttttactccttcccc

SEQ ID NO: 2415 - DNA, 32 bp, synthetic construct
  source 1..32: mol_type = other DNA
gccatcctcctgctttagcctccccagcagct

SEQ ID NO: 2416 - DNA, 21 bp, synthetic construct
  source 1..21: mol_type = other DNA
cacacagtaggcacctgataa

SEQ ID NO: 2417 - DNA, 30 bp, synthetic construct
  source 1..30: mol_type = other DNA
ttatgccatcctcctgctggcttctcccca

SEQ ID NO: 2418 - DNA, 20 bp, synthetic construct
  source 1..20: mol_type = other DNA
ctctatgcatatatttgaat

SEQ ID NO: 2419 - DNA, 50 bp, synthetic construct
  source 1..50: mol_type = other DNA
gccatcctcctgcctcagcctccccagcagctgggactacaggcacatgc

SEQ ID NO: 2420 - DNA, 50 bp, synthetic construct
  source 1..50: mol_type = other DNA
tttgctttttgtgctttttgaaagctaccatggttttaaaaaaattatct

SEQ ID NO: 2421 - DNA, 50 bp, synthetic construct
  source 1..50: mol_type = other DNA
taattttatagaactaaaaacatctgataaaaccatttcttcatacctgc

SEQ ID NO: 2422 - DNA, 30 bp, synthetic construct
  source 1..30: mol_type = other DNA
ctttctctgttctaacaactaaaaacttct

SEQ ID NO: 2423 - DNA, 25 bp, synthetic construct
  source 1..25: mol_type = other DNA
ataagtagaaactacaaaataaatt

SEQ ID NO: 2424 - DNA, 33 bp, synthetic construct
  source 1..33: mol_type = other DNA
tgttctctctgcctgcaatgttcttccccagat

SEQ ID NO: 2425 - DNA, 23 bp, synthetic construct
  source 1..23: mol_type = other DNA
ctctttgctcaaatgttaccttt

SEQ ID NO: 2426 - DNA, 26 bp, synthetic construct
  source 1..26: mol_type = other DNA
ccatagcaggtgctcaataattattt

SEQ ID NO: 2427 - DNA, 32 bp, synthetic construct
  source 1..32: mol_type = other DNA
catagaaggtgctcaataaatgtgtcttattt

SEQ ID NO: 2428 - DNA, 28 bp, synthetic construct
  source 1..28: mol_type = other DNA
tcccatagaaggtgctagcaatattatt

SEQ ID NO: 2429 - DNA, 50 bp, synthetic construct
  source 1..50: mol_type = other DNA
catagaaggtgctcaataaatatttgttgagtaagaaatgtacaaaagta

SEQ ID NO: 2430 - DNA, 50 bp, synthetic construct
  source 1..50: mol_type = other DNA
gacagagtagcagtagtgtgctggtaaatgttttgaccactggcttttgg

SEQ ID NO: 2431 - DNA, 50 bp, synthetic construct
  source 1..50: mol_type = other DNA
ggaggaggctgatttttagcatgtgttgattttcatgatgtacatactcc

SEQ ID NO: 2432 - DNA, 50 bp, synthetic construct
  source 1..50: mol_type = other DNA
caacatggtcaatttcaaactatgactgtgatgacaaaattcttggaaat

SEQ ID NO: 2433 - DNA, 50 bp, synthetic construct
  source 1..50: mol_type = other DNA
taaaaaaaatgggcttttgtgagcaggaaggtggagatccagcactctac

SEQ ID NO: 2434 - DNA, 50 bp, synthetic construct
  source 1..50: mol_type = other DNA
tactagtgtgatgagccctcatgtaattatcacccagcttcaacaattat

SEQ ID NO: 2435 - DNA, 50 bp, synthetic construct
  source 1..50: mol_type = other DNA
caactgaccgtcagtcttgtttcatctctaccctcgcccatttctcccca

SEQ ID NO: 2436 - DNA, 12 bp, synthetic construct
  source 1..12: mol_type = other DNA
cctttattattt

SEQ ID NO: 2437 - DNA, 50 bp, synthetic construct
  source 1..50: mol_type = other DNA
ggccgggtgcagtggctcatgcctataatcccagcactttgggaggctga

SEQ ID NO: 2438 - DNA, 50 bp, synthetic construct
  source 1..50: mol_type = other DNA
ggcaggcagatcgcttgagaccaggagttcgagaccatcctggccaacat

SEQ ID NO: 2439 - DNA, 50 bp, synthetic construct
  source 1..50: mol_type = other DNA
ggtgaaaccccatctctacttaaaaaaaaaaaaaaatacaaaattagcca

SEQ ID NO: 2440 - DNA, 50 bp, synthetic construct
  source 1..50: mol_type = other DNA
ggcatggtggcatgcacctataatcccagctactcaggaggctgaggcac

SEQ ID NO: 2441 - DNA, 50 bp, synthetic construct
  source 1..50: mol_type = other DNA
gagaatcgcttgaacccgggaagtaaaggttgcagtgaacagagatcgag

SEQ ID NO: 2442 - DNA, 33 bp, synthetic construct
  source 1..33: mol_type = other DNA
ccactccactccagcctaggtgacagagtgaga

SEQ ID NO: 2443 - DNA, 50 bp, synthetic construct
  source 1..50: mol_type = other DNA
ggtggctcacgcctgtaatcccagcactttgggaggccgaggtgggtgga

SEQ ID NO: 2444 - DNA, 50 bp, synthetic construct
  source 1..50: mol_type = other DNA
tcacttgaggtcaggagtttgagaccagcctggccaatgtggagaaaccc

SEQ ID NO: 2445 - DNA, 50 bp, synthetic construct
  source 1..50: mol_type = other DNA
cgtctcttatgaaaaatacaaaaattagctgggtgtggtggcgcacacct

SEQ ID NO: 2446 - DNA, 50 bp, synthetic construct
  source 1..50: mol_type = other DNA
gtaatcccagctactcgggaggctgaagcaagagaatcgcttgaacccag

SEQ ID NO: 2447 - DNA, 50 bp, synthetic construct
  source 1..50: mol_type = other DNA
gagatggaggttgtagagagcagagattgcaccactgttctccagcctgg

SEQ ID NO: 2448 - DNA, 50 bp, synthetic construct
  source 1..50: mol_type = other DNA
gcaacaaagtgagactccatctctaaataaataaataaattaattaatta

SEQ ID NO: 2449 - DNA, 50 bp, synthetic construct
  source 1..50: mol_type = other DNA
attaaataaaacacttgtgtcattctttttataaaacccctatctcttta

SEQ ID NO: 2450 - DNA, 50 bp, synthetic construct
  source 1..50: mol_type = other DNA
agacatgtactctaagaacattcaaaaatgcatggggctgggcacggtgg

SEQ ID NO: 2451 - DNA, 50 bp, synthetic construct
  source 1..50: mol_type = other DNA
ctcacacctgtcatcccagcaatttgggaggctgaggcatgtggatcact

SEQ ID NO: 2452 - DNA, 50 bp, synthetic construct
  source 1..50: mol_type = other DNA
tgaggtcaggaattcgagaccagcctagccaacatgttgaaaccccatct

SEQ ID NO: 2453 - DNA, 50 bp, synthetic construct
  source 1..50: mol_type = other DNA
ctactaaaaccacaaaaaattagccagacgtggtgacacgtgcctgtaat

SEQ ID NO: 2454 - DNA, 50 bp, synthetic construct
  source 1..50: mol_type = other DNA
cccagctacttgggaggctgaggcacgagaatcacttgaacccgggaggc

SEQ ID NO: 2455 - DNA, 50 bp, synthetic construct
  source 1..50: mol_type = other DNA
ggattttgcagtgagcccagatcgtgccactgcactccagcctgggcaac

SEQ ID NO: 2456 - DNA, 10 bp, synthetic construct
  source 1..10: mol_type = other DNA
agagcgagta

SEQ ID NO: 2457 - DNA, 50 bp, synthetic construct
  source 1..50: mol_type = other DNA
ggtgcggtggctcacaactgtaatcccagcactttgggaggccaaggcag

SEQ ID NO: 2458 - DNA, 50 bp, synthetic construct
  source 1..50: mol_type = other DNA
ggggatcacttgaggtcaggaatttaagaccagcgtggccaacacggtga

SEQ ID NO: 2459 - DNA, 50 bp, synthetic construct
  source 1..50: mol_type = other DNA
aaccccgtctctactaaaaatacaaaaattagccaggcttggtggcgggc

SEQ ID NO: 2460 - DNA, 50 bp, synthetic construct
  source 1..50: mol_type = other DNA
gcctgtaatcccagctactcgggaggctgaggcacgagaatcacttgaac

SEQ ID NO: 2461 - DNA, 50 bp, synthetic construct
  source 1..50: mol_type = other DNA
ctgggaggcagaggttgcagtgagctgagattgtgccactgtactccacc

SEQ ID NO: 2462 - DNA, 20 bp, synthetic construct
  source 1..20: mol_type = other DNA
ctgggcgacagagcgagact

SEQ ID NO: 2463 - DNA, 20 bp, synthetic construct
  source 1..20: mol_type = other DNA
tctctcagctctgtcccctc

SEQ ID NO: 2464 - DNA, 29 bp, synthetic construct
  source 1..29: mol_type = other DNA
ctctcagctctgtcccctcaaccccactt

SEQ ID NO: 2465 - DNA, 29 bp, synthetic construct
  source 1..29: mol_type = other DNA
ctctcagctctgtcccctcaaccccactt

SEQ ID NO: 2466 - DNA, 26 bp, synthetic construct
  source 1..26: mol_type = other DNA
accttgggtaagtcacttcccctctc

SEQ ID NO: 2467 - DNA, 44 bp, synthetic construct
  source 1..44: mol_type = other DNA
tgtgaccctgggcaagttacttaccctctctgggcctcagttcc

SEQ ID NO: 2468 - DNA, 40 bp, synthetic construct
  source 1..40: mol_type = other DNA
tatgtgactttgggcaagtggcttcccctctctgggcctc

SEQ ID NO: 2469 - DNA, 35 bp, synthetic construct
  source 1..35: mol_type = other DNA
ggcaagtggctttccgtctctgggcctcagtttcc

SEQ ID NO: 2470 - DNA, 35 bp, synthetic construct; identical to SEQ ID NO: 2469
  source 1..35: mol_type = other DNA

SEQ ID NO: 2471 - DNA, 36 bp, synthetic construct
  source 1..36: mol_type = other DNA
aaccctgggcaagtggcttcacctctctgggtctca

SEQ ID NO: 2472 - DNA, 35 bp, synthetic construct
  source 1..35: mol_type = other DNA
aaccctgggcaagtggcttacaactctctgagcct

SEQ ID NO: 2473 - DNA, 33 bp, synthetic construct
  source 1..33: mol_type = other DNA
ccctgggcaagttccttaacctctctgggcctc

SEQ ID NO: 2474 - DNA, 50 bp, synthetic construct
  source 1..50: mol_type = other DNA
aaccaatcacaattataaggaccttatttggatcctgactcagataaaca

SEQ ID NO: 2475 - DNA, 24 bp, synthetic construct
  source 1..24: mol_type = other DNA
gacaaaacaatttatgagacaaac

SEQ ID NO: 2476 - DNA, 50 bp, synthetic construct
  source 1..50: mol_type = other DNA
tgtggttatgttttaaaaaaaatcagtccctagtttttttatagctacat

SEQ ID NO: 2477 - DNA, 47 bp, synthetic construct
  source 1..47: mol_type = other DNA
actggcatacttacagattaaattatatgatgtctgaaatttgcttc

SEQ ID NO: 2478 - DNA, 50 bp, synthetic construct
  source 1..50: mol_type = other DNA
tttggatcctgattcaaggaaactactaaagtaatttgtaatatttatga

SEQ ID NO: 2479 - DNA, 50 bp, synthetic construct
  source 1..50: mol_type = other DNA
tacaattggaaattagaaagcaatttataacatttataatataattggaa

SEQ ID NO: 2480 - DNA, 50 bp, synthetic construct
  source 1..50: mol_type = other DNA
atttgaacattgccttgatgtttgatgatattggtaaggataaggaatta

SEQ ID NO: 2481 - DNA, 13 bp, synthetic construct
  source 1..13: mol_type = other DNA
ctattaatttttt

SEQ ID NO: 2482 - DNA, 50 bp, synthetic construct
  source 1..50: mol_type = other DNA
ggctcacgcctgtaatcccagcactttgggaggccgaggcgggtggatca

SEQ ID NO: 2483 - DNA, 50 bp, synthetic construct
  source 1..50: mol_type = other DNA; mol_type = other DNA
ggaggtcaggagatcgagaccatcctggctaacacggtgaaaccccgtct

SEQ ID NO: 2484 - DNA, 50 bp, synthetic construct
  source 1..50: mol_type = other DNA; mol_type = other DNA
ctactaaaaatacaaaaaaaattagccgggcgcggtggcgggcgcctgta

SEQ ID NO: 2485 - DNA, 50 bp, synthetic construct
  source 1..50: mol_type = other DNA; mol_type = other DNA
gtcccagctactcgggaggctgaggcaggagaatggagtgaacccgggag

SEQ ID NO: 2486 - DNA, 50 bp, synthetic construct
  source 1..50: mol_type = other DNA; mol_type = other DNA
gcggagcttgcagtgagccgagattgcgccactgcagtccgcagtccggc

SEQ ID NO: 2487 - DNA, 33 bp, synthetic construct
  source 1..33: mol_type = other DNA; mol_type = other DNA
ctgggcgacagagcgagactccgtctcaaaaaa

SEQ ID NO: 2488 - DNA, 39 bp, synthetic construct
  source 1..39: mol_type = other DNA; mol_type = other DNA
ctcagtctcagtttcctcatctgtaaaatgaaaataaaa

SEQ ID NO: 2489 - DNA, 32 bp, synthetic construct
  source 1..32: mol_type = other DNA; mol_type = other DNA
cctctgtctcagtttcctcatctgtaatggat

SEQ ID NO: 2490 - DNA, 30 bp, synthetic construct
  source 1..30: mol_type = other DNA; mol_type = other DNA
ctctctgtgtctcagtttcctcatctgtaa

SEQ ID NO: 2491 - DNA, 50 bp, synthetic construct
  source 1..50: mol_type = other DNA; mol_type = other DNA
gttgaagccttaactcccaatgcaactgtatctggagatagagcctttaa

SEQ ID NO: 2492 - DNA, 50 bp, synthetic construct
  source 1..50: mol_type = other DNA; mol_type = other DNA
agaggtggttaaggttaaatgaagtcatgagggtggggtcctgactgatg

SEQ ID NO: 2493 - DNA, 50 bp, synthetic construct
  source 1..50: mol_type = other DNA; mol_type = other DNA
atgcccttataacaagaggaagaggctgggtgtggtggctcatgcctgta

SEQ ID NO: 2494 - DNA, 50 bp, synthetic construct
  source 1..50: mol_type = other DNA; mol_type = other DNA
atcccagcactttgggaggctgagatgggtggatcacgatgtcgggagtt

SEQ ID NO: 2495 - DNA, 50 bp, synthetic construct
  source 1..50: mol_type = other DNA; mol_type = other DNA
tgagaccagcctggccaagatgaaaaaacccggtctctactaaaaataca

SEQ ID NO: 2496 - DNA, 50 bp, synthetic construct
  source 1..50: mol_type = other DNA; mol_type = other DNA
aaaactagctgggcgtggtggcgggcgcctgtaatcccagatactcggga

SEQ ID NO: 2497 - DNA, 50 bp, synthetic construct
  source 1..50: mol_type = other DNA; mol_type = other DNA
ggccgaggcaggagaattgcttgaacccaggaggtggaggttgtggtgag

SEQ ID NO: 2498 - DNA, 50 bp, synthetic construct
  source 1..50: mol_type = other DNA; mol_type = other DNA
ctgagatcgtgccaccacactctagcctgggcgacagagcaagattccgt

SEQ ID NO: 2499 - DNA, 50 bp, synthetic construct
  source 1..50: mol_type = other DNA; mol_type = other DNA
aaaaaaaaacacacacacacacacacacacacacaaaacacaaggatgtg

SEQ ID NO: 2500 - DNA, 50 bp, synthetic construct
  source 1..50: mol_type = other DNA; mol_type = other DNA
cacacacagagaaaaggccatgtgaggacacagcgagaaggtggccatct

SEQ ID NO: 2501 - DNA, 50 bp, synthetic construct
  source 1..50: mol_type = other DNA; mol_type = other DNA
gcaagccagggagagaggcctcaccagaaaccacacctgccatgaccttg

SEQ ID NO: 2502 - DNA, 50 bp, synthetic construct
  source 1..50: mol_type = other DNA; mol_type = other DNA
accttagacttccagcctccagaactgtaagaaagaaatttgtttaggcc

SEQ ID NO: 2503 - DNA, 26 bp, synthetic construct
  source 1..26: mol_type = other DNA; mol_type = other DNA
acccagtctgtggtattgtgttatgg

SEQ ID NO: 2504 - DNA, 50 bp, synthetic construct
  source 1..50: mol_type = other DNA; mol_type = other DNA
aatgtgactctatttggagatagggcctttaaagagataattaaggttaa

SEQ ID NO: 2505 - DNA, 50 bp, synthetic construct
  source 1..50: mol_type = other DNA; mol_type = other DNA
ataaggtcatagtcataagggtggagccctaatccaataggactagtgtc

SEQ ID NO: 2506 - DNA, 50 bp, synthetic construct
  source 1..50: mol_type = other DNA
cctgtaagaagaggaagggacaccaaggacctgtgtgcaagagaaaaggc

SEQ ID NO: 2507 - DNA, 50 bp, synthetic construct
  source 1..50: mol_type = other DNA
cacatgaggacacagtgagaaggggaccatccacaagccaaagagagagg

SEQ ID NO: 2508 - DNA, 50 bp, synthetic construct
  source 1..50: mol_type = other DNA
cctcaggagaaactaaacctgccgacaccttgatcttggacattcagtct

SEQ ID NO: 2509 - DNA, 50 bp, synthetic construct
  source 1..50: mol_type = other DNA
cttttctcattctgaataaatatttctttcatgccatcttttgtaacttt

SEQ ID NO: 2510 - DNA, 11 bp, synthetic construct
  source 1..11: mol_type = other DNA
gtattcttttt

SEQ ID NO: 2511 - DNA, 38 bp, synthetic construct
  source 1..38: mol_type = other DNA
tctaaataaatattcactttttaacctaattttgtatt

SEQ ID NO: 2512 - DNA, 36 bp, synthetic construct
  source 1..36: mol_type = other DNA
aatattcacttttgtacctaacctcctattcttttt

SEQ ID NO: 2513 - DNA, 50 bp, synthetic construct
  source 1..50: mol_type = other DNA
gatgggaagattatcctggattatctgggtaggccctctgcaatcactgg

SEQ ID NO: 2514 - DNA, 50 bp, synthetic construct
  source 1..50: mol_type = other DNA
tgtccttataagagggagacagagggaggtttgacccagaacaagaagac

SEQ ID NO: 2515 - DNA, 50 bp, synthetic construct
  source 1..50: mol_type = other DNA
aaagtacccacaaaagcatgatgatgcgctgagggctttgaagatggagg

SEQ ID NO: 2516 - DNA, 50 bp, synthetic construct
  source 1..50: mol_type = other DNA; mol_type = other DNA
aaggggccatgagccaaggaatgcaaaggaaaacatctagaagtgggaag

SEQ ID NO: 2517 - DNA, 50 bp, synthetic construct
  source 1..50: mol_type = other DNA; mol_type = other DNA
atacaaggaaacagattccgcactggagcctctggagggagcgtggctct

SEQ ID NO: 2518 - DNA, 50 bp, synthetic construct
  source 1..50: mol_type = other DNA; mol_type = other DNA
gccaacaccttgatttcagcccagtgaaactgatttcaggcttctgacct

SEQ ID NO: 2519 - DNA, 50 bp, synthetic construct
  source 1..50: mol_type = other DNA; mol_type = other DNA
ccagaactataagagaataaatgtgtgttcttttatgccaccaagtttgt

SEQ ID NO: 2520 - DNA, 40 bp, synthetic construct
  source 1..40: mol_type = other DNA; mol_type = other DNA
ggcactttgttacagcagcaataggaaactaatacagtcc

SEQ ID NO: 2521 - DNA, 50 bp, synthetic construct
  source 1..50: mol_type = other DNA; mol_type = other DNA
tttgcagatgtgattgaaaattttacagtgggcatccagctgtgcttgat

SEQ ID NO: 2522 - DNA, 50 bp, synthetic construct
  source 1..50: mol_type = other DNA; mol_type = other DNA
gtcatcataagggtccttataagtggaaaaaggagtcaggagggtcagag

SEQ ID NO: 2523 - DNA, 50 bp, synthetic construct
  source 1..50: mol_type = other DNA; mol_type = other DNA
ccagagaaggaaatgtcttgagaaaagcagaggtcagtatgatgcggggc

SEQ ID NO: 2524 - DNA, 50 bp, synthetic construct
  source 1..50: mol_type = other DNA; mol_type = other DNA
catgagccaaggaatactggcagcctctagaagctagataagacaaggaa

SEQ ID NO: 2525 - DNA, 50 bp, synthetic construct
  source 1..50: mol_type = other DNA; mol_type = other DNA
atggattatctcctagagccttcagaagcaaccacagccccgccaatccg

SEQ ID NO: 2526 - DNA, 50 bp, synthetic construct
  source 1..50: mol_type = other DNA; mol_type = other DNA
ttttagatttctgacctccagaattgtaaaataataaatttgtgtcattt

SEQ ID NO: 2527 - DNA, 50 bp, synthetic construct
  source 1..50: mol_type = other DNA; mol_type = other DNA
taagctatgaaggttgtggtcacttgttacagcagcaacaggaaactaat

SEQ ID NO: 2528 - DNA, 50 bp, synthetic construct
  source 1..50: mol_type = other DNA; mol_type = other DNA
acaactatgtactaaaaaatatgcataaataggcccactgttcacagcca

SEQ ID NO: 2529 - DNA, 50 bp, synthetic construct
  source 1..50: mol_type = other DNA; mol_type = other DNA
agtaaaagagtcatctaggtcaaatcagactaaaggaaattgcttcaagc

SEQ ID NO: 2530 - DNA, 50 bp, synthetic construct
  source 1..50: mol_type = other DNA; mol_type = other DNA
agaacctgtgaatatgtttacttacatggcaaatgggactttgcagatgt

SEQ ID NO: 2531 - DNA, 50 bp, synthetic construct
  source 1..50: mol_type = other DNA; mol_type = other DNA
gaataagctaagggtcttgagatgggaaggctattctgaactgtctgggt

SEQ ID NO: 2532 - DNA, 50 bp, synthetic construct
  source 1..50: mol_type = other DNA; mol_type = other DNA
gggcccagtgtgatcacaagagtccttataagtgaaaaagggagataaaa

SEQ ID NO: 2533 - DNA, 50 bp, synthetic construct
  source 1..50: mol_type = other DNA; mol_type = other DNA
gtcagagctgggagaaatttgaagatgtatgctactggctttgaagaacg

SEQ ID NO: 2534 - DNA, 50 bp, synthetic construct
  source 1..50: mol_type = other DNA; mol_type = other DNA
gtctataaaccaaggaacgctggcctctagaagctggaaagtgcaaggaa

SEQ ID NO: 2535 - DNA, 50 bp, synthetic construct
  source 1..50: mol_type = other DNA; mol_type = other DNA
acagattctccctgagagcctccagagggacacagccctgctgacatctt

SEQ ID NO: 2536 - DNA, 50 bp, synthetic construct
  source 1..50: mol_type = other DNA; mol_type = other DNA
gattttagcccaatgagacccattttggacttttgtcttccagaacttta

SEQ ID NO: 2537 - DNA, 50 bp, synthetic construct
  source 1..50: mol_type = other DNA; mol_type = other DNA
agataataaatacatgctgttttaagccactaatttgttacagcagcaat

SEQ ID NO: 2538 - DNA, 20 bp, synthetic construct
  source 1..20: mol_type = other DNA; mol_type = other DNA
aggaaactaatactcatggg

SEQ ID NO: 2539 - DNA, 50 bp, synthetic construct
  source 1..50: mol_type = other DNA; mol_type = other DNA
caaaatgtgcacatctgaattcctggaacccatgaatatgacaccttaca

SEQ ID NO: 2540 - DNA, 50 bp, synthetic construct
  source 1..50: mol_type = other DNA; mol_type = other DNA
tggcaagaggggctttgcagatgtgattaagttaaggatcatgagatagg

SEQ ID NO: 2541 - DNA, 50 bp, synthetic construct
  source 1..50: mol_type = other DNA; mol_type = other DNA
gggattattctacattatctggacatcccccaatgtaatcaccagtgtcc

SEQ ID NO: 2542 - DNA, 50 bp, synthetic construct
  source 1..50: mol_type = other DNA; mol_type = other DNA
ttatatatgaaagatggagacaggagagccagggtgaaagagaaatgtga

SEQ ID NO: 2543 - DNA, 50 bp, synthetic construct
  source 1..50: mol_type = other DNA; mol_type = other DNA
agatgctatgctctgggctttgaagatagaagaaggggccatgagccaag

SEQ ID NO: 2544 - DNA, 50 bp, synthetic construct
  source 1..50: mol_type = other DNA; mol_type = other DNA
gaacgtaggtagcttccagaagctggaaaaggtggggaaacattccttct

SEQ ID NO: 2545 - DNA, 50 bp, synthetic construct
  source 1..50: mol_type = other DNA; mol_type = other DNA
ctagagcctccagaatgcagccctgctgataccttgattctggcctagtg

SEQ ID NO: 2546 - DNA, 30 bp, synthetic construct
  source 1..30: mol_type = other DNA; mol_type = other DNA
agacctgtttcagacttctgacctccaaaa

SEQ ID NO: 2547 - DNA, 50 bp, synthetic construct
  source 1..50: mol_type = other DNA; mol_type = other DNA
tcctaatctccagaacctgtgcataagttaccttacacagcaagagactt

SEQ ID NO: 2548 - DNA, 50 bp, synthetic construct
  source 1..50: mol_type = other DNA; mol_type = other DNA
tgcagatgtgattgagtttgagatggacagattactgaattatctgggtt

SEQ ID NO: 2549 - DNA, 50 bp, synthetic construct
  source 1..50: mol_type = other DNA; mol_type = other DNA
ggtccagtgcaatcacaaaggtccttataagggaagcagggaagcatgag

SEQ ID NO: 2550 - DNA, 50 bp, synthetic construct
  source 1..50: mol_type = other DNA; mol_type = other DNA
aaagatggagaacagatgtgatgacagaagcagaggctgatgtgctttga

SEQ ID NO: 2551 - DNA, 50 bp, synthetic construct
  source 1..50: mol_type = other DNA; mol_type = other DNA
aggtggaggagggggccgttaatcaagaaatgacgatggcctctagaagc

SEQ ID NO: 2552 - DNA, 50 bp, synthetic construct
  source 1..50: mol_type = other DNA; mol_type = other DNA
tgacaaagatgaaaaatggattctcccctcaagcttccagaaagaatgta

SEQ ID NO: 2553 - DNA, 50 bp, synthetic construct
  source 1..50: mol_type = other DNA; mol_type = other DNA
gccctgaagacctgtttgggacttctgacctccagaactgtaagagaatg

SEQ ID NO: 2554 - DNA, 50 bp, synthetic construct
  source 1..50: mol_type = other DNA; mol_type = other DNA
aatttgtgttgctttaagccactaagtttgtagaaacttgttacagcagc

SEQ ID NO: 2555 - DNA, 20 bp, synthetic construct
  source 1..20: mol_type = other DNA; mol_type = other DNA
aaataggaaactaatacacc

SEQ ID NO: 2556 - DNA, 50 bp, synthetic construct
  source 1..50: mol_type = other DNA; mol_type = other DNA
gaagattatcctggattatctgggtgatctcaatgtagtcctgagggtcc

SEQ ID NO: 2557 - DNA, 50 bp, synthetic construct
  source 1..50: mol_type = other DNA; mol_type = other DNA
ttgtaagagggaggcagaaggacatgtgaccacagaagaggagatggcac

SEQ ID NO: 2558 - DNA, 50 bp, synthetic construct
  source 1..50: mol_type = other DNA; mol_type = other DNA
ctacgatggaagcaaagattggagtgatgtggctacaatccaaggaatgt

SEQ ID NO: 2559 - DNA, 50 bp, synthetic construct
  source 1..50: mol_type = other DNA; mol_type = other DNA
ggcggcccctagaagccggaagaggaaggaatgaattcttccagggagcc

SEQ ID NO: 2560 - DNA, 50 bp, synthetic construct
  source 1..50: mol_type = other DNA; mol_type = other DNA
ttcagaaggggccagccctgctcacaccttgatttgagccctgcaagact

SEQ ID NO: 2561 - DNA, 40 bp, synthetic construct
  source 1..40: mol_type = other DNA; mol_type = other DNA
cctttcagacttctgacctccagaactgtaagagaataag

SEQ ID NO: 2562 - DNA, 50 bp, synthetic construct
  source 1..50: mol_type = other DNA; mol_type = other DNA
gatgagaagattatcctggatgatttgggtgggcacatggtaatcacaag

SEQ ID NO: 2563 - DNA, 50 bp, synthetic construct
  source 1..50: mol_type = other DNA; mol_type = other DNA
gatccttgtaagaaggaggcagcagtgtcagagtcagagaaggaaacgtg

SEQ ID NO: 2564 - DNA, 50 bp, synthetic construct
  source 1..50: mol_type = other DNA; mol_type = other DNA
acaacaggagcagaggttggagcgatgtaattgctgcctttgaagatgga

SEQ ID NO: 2565 - DNA, 50 bp, synthetic construct
  source 1..50: mol_type = other DNA; mol_type = other DNA
aggggccatgagccaaggaatacaggcagcctctagaagttggaaaaggc

SEQ ID NO: 2566 - DNA, 50 bp, synthetic construct
  source 1..50: mol_type = other DNA; mol_type = other DNA
aagagggaggcaggatggtcagagtcagaaaggaggtgtgccgacagaaa

SEQ ID NO: 2567 - DNA, 50 bp, synthetic construct
  source 1..50: mol_type = other DNA; mol_type = other DNA
tggaggttggagtgatgtactttgaagatggactgtagaaccacaaccca

SEQ ID NO: 2568 - DNA, 50 bp, synthetic construct
  source 1..50: mol_type = other DNA; mol_type = other DNA
aggaggcaggcaggcaacctctagaagtctgaaaaggcaaataaacagct

SEQ ID NO: 2569 - DNA, 50 bp, synthetic construct
  source 1..50: mol_type = other DNA; mol_type = other DNA
tctcctgtggagcatccagaaggaatgcagccctgccaaccctttgattt

SEQ ID NO: 2570 - DNA, 50 bp, synthetic construct
  source 1..50: mol_type = other DNA; mol_type = other DNA
tagtcttgtaagattcattttagacttctgaccttcacggctggaaggta

SEQ ID NO: 2571 - DNA, 50 bp, synthetic construct
  source 1..50: mol_type = other DNA; mol_type = other DNA
tggtggctcatgcgtgtaatcccagcattttggggggctgaggcaggcag

SEQ ID NO: 2572 - DNA, 50 bp, synthetic construct
  source 1..50: mol_type = other DNA; mol_type = other DNA
atcacctgaggtcaggagtttgagaacagcctggccaacatagtgaaacc

SEQ ID NO: 2573 - DNA, 50 bp, synthetic construct
  source 1..50: mol_type = other DNA; mol_type = other DNA
ctgtctctactaaaaatacaaaaattagccgggcatggtggcatgcacct

SEQ ID NO: 2574 - DNA, 50 bp, synthetic construct
  source 1..50: mol_type = other DNA; mol_type = other DNA
gtaatcccagctactcaggaggctgaggcaggagaatcacttgaatccga

SEQ ID NO: 2575 - DNA, 50 bp, synthetic construct
  source 1..50: mol_type = other DNA; mol_type = other DNA
gaggcagaggttgcagtgagcaaagattctgccactgtgctccagcctgg

SEQ ID NO: 2576 - DNA, 20 bp, synthetic construct
  source 1..20: mol_type = other DNA
gtgacagtaagactctctct

SEQ ID NO: 2577 - DNA, 20 bp, synthetic construct
  source 1..20: mol_type = other DNA; mol_type = other DNA
tattgtttgaagccactgga

SEQ ID NO: 2578 - DNA, 49 bp, synthetic construct
  source 1..49: mol_type = other DNA; mol_type = other DNA
gggttcaagtcctgatccgactgcatactggctgtgtgacctgcggcat

SEQ ID NO: 2579 - DNA, 50 bp, synthetic construct
  source 1..50: mol_type = other DNA; mol_type = other DNA
gctacccaacttccctcagcctccattttctcatctctaaaatgagaaga

SEQ ID NO: 2580 - DNA, 50 bp, synthetic construct
  source 1..50: mol_type = other DNA; mol_type = other DNA
ttataaagagcatcagccatgtggagctggtgtgagaattcaatgaggca

SEQ ID NO: 2581 - DNA, 50 bp, synthetic construct
  source 1..50: mol_type = other DNA; mol_type = other DNA
agacctgcgagcagttagctaattagctcagtgcttgccacacagtaaac

SEQ ID NO: 2582 - DNA, 50 bp, synthetic construct
  source 1..50: mol_type = other DNA; mol_type = other DNA
actgacaaataatgaggtttcattaagcttattattttgtgaaaaaggca

SEQ ID NO: 2583 - DNA, 50 bp, synthetic construct
  source 1..50: mol_type = other DNA; mol_type = other DNA
gttccctggccccacctcaggagattctgattctggaatctggtgaacta

SEQ ID NO: 2584 - DNA, 50 bp, synthetic construct
  source 1..50: mol_type = other DNA; mol_type = other DNA
gtttggaagtgttgtcaaagccctgctctgccaggtactaatagtgagta

SEQ ID NO: 2585 - DNA, 50 bp, synthetic construct
  source 1..50: mol_type = other DNA; mol_type = other DNA
cccaggaaggttacctccctgagcctctgtttcctcctctgtaaaacagg

SEQ ID NO: 2586 - DNA, 50 bp, synthetic construct
  source 1..50: mol_type = other DNA; mol_type = other DNA
tttggccttggataaatccttctccctccctgagcctcagtttcttcctc

SEQ ID NO: 2587 - DNA, 20 bp, synthetic construct
  source 1..20: mol_type = other DNA; mol_type = other DNA
tgtaaaatggggctgccacc

SEQ ID NO: 2588 - DNA, 50 bp, synthetic construct
  source 1..50: mol_type = other DNA; mol_type = other DNA
cttccctgtgcctctgtttcctcctctggtaaatgggaacagtaagagga

SEQ ID NO: 2589 - DNA, 40 bp, synthetic construct
  source 1..40: mol_type = other DNA; mol_type = other DNA
gcctctgtttcctcatctgtaaaactgggatagtaatact

SEQ ID NO: 2590 - DNA, 50 bp, synthetic construct
  source 1..50: mol_type = other DNA; mol_type = other DNA
gagagacatgggttcgaatcctggctctgccacctactagctgtggggcc

SEQ ID NO: 2591 - DNA, 20 bp, synthetic construct
  source 1..20: mol_type = other DNA; mol_type = other DNA
ctgaggccttggagagggaa

SEQ ID NO: 2592 - DNA, 30 bp, synthetic construct
  source 1..30: mol_type = other DNA; mol_type = other DNA
tttcaaactgtgttccatggagtcctggga

SEQ ID NO: 2593 - DNA, 30 bp, synthetic construct
  source 1..30: mol_type = other DNA; mol_type = other DNA
tttcaaactgtgttctgtggagccttagcc

SEQ ID NO: 2594 - DNA, 50 bp, synthetic construct
  source 1..50: mol_type = other DNA; mol_type = other DNA
agagcctggcacatagtaggcacttttcatgagtgattgttgaatggtag

SEQ ID NO: 2595 - DNA, 50 bp, synthetic construct
  source 1..50: mol_type = other DNA; mol_type = other DNA
gcctggcacatagtaggcactcaataaatacttgttgaatggaggaatct

SEQ ID NO: 2596 - DNA, 30 bp, synthetic construct
  source 1..30: mol_type = other DNA; mol_type = other DNA
tgaacttataaatgaatttggcaaagctta

SEQ ID NO: 2597 - DNA, 40 bp, synthetic construct
  source 1..40: mol_type = other DNA; mol_type = other DNA
agtgcctggcacagagcaggactccatcagtagtagttac

SEQ ID NO: 2598 - DNA, 30 bp, synthetic construct
  source 1..30: mol_type = other DNA; mol_type = other DNA
atgtatgtaaagtgcctggcacaaagtagg

SEQ ID NO: 2599 - DNA, 50 bp, synthetic construct
  source 1..50: mol_type = other DNA; mol_type = other DNA
taatctttctgagtcttagttttctcatctataaaatggggatgataata

SEQ ID NO: 2600 - DNA, 10 bp, synthetic construct
  source 1..10: mol_type = other DNA; mol_type = other DNA
atagtaataa

SEQ ID NO: 2601 - DNA, 50 bp, synthetic construct
  source 1..50: mol_type = other DNA; mol_type = other DNA
ggtgtgaatcttggccctgccatttgctaaccgggtgaccttgggcaagt

SEQ ID NO: 2602 - DNA, 50 bp, synthetic construct
  source 1..50: mol_type = other DNA; mol_type = other DNA
gcccccaggcctttgcacctgctgttccctctgcctggaaggacactcac

SEQ ID NO: 2603 - DNA, 50 bp, synthetic construct
  source 1..50: mol_type = other DNA; mol_type = other DNA
ttcccttttcctagagctcaggagccacctccactgggaagccttccctg

SEQ ID NO: 2604 - DNA, 50 bp, synthetic construct
  source 1..50: mol_type = other DNA; mol_type = other DNA
aggcagccaaacttcagttcgaatcttctggctcttaccagacccctgat

SEQ ID NO: 2605 - DNA, 50 bp, synthetic construct
  source 1..50: mol_type = other DNA; mol_type = other DNA
gaatcccaggatcttcgcaggtggtcccagggcctctttgaaccacagtt

SEQ ID NO: 2606 - DNA, 22 bp, synthetic construct
  source 1..22: mol_type = other DNA; mol_type = other DNA
ttacttatctgaaaaataaaaa

SEQ ID NO: 2607 - DNA, 50 bp, synthetic construct
  source 1..50: mol_type = other DNA; mol_type = other DNA
tggttaaagcaaaggcattaagtctggatcactggatgcctgtcctggct

SEQ ID NO: 2608 - DNA, 50 bp, synthetic construct
  source 1..50: mol_type = other DNA; mol_type = other DNA
ctgtgatatcctaatgtgtaaccttgtcaagttacttaaacttcctgcac

SEQ ID NO: 2609 - DNA, 50 bp, synthetic construct
  source 1..50: mol_type = other DNA; mol_type = other DNA
ctaatgttcctgatctgtcaaatggagctgattatatctcataggatttt

SEQ ID NO: 2610 - DNA, 50 bp, synthetic construct
  source 1..50: mol_type = other DNA
gagactcaaatgagaagatccatggaaagtgcttagaacagttatcagta

SEQ ID NO: 2611 - DNA, 32 bp, synthetic construct
  source 1..32: mol_type = other DNA
ccgtggaaattcacaatacatgttaactgtta

SEQ ID NO: 2612 - DNA, 50 bp, synthetic construct
  source 1..50: mol_type = other DNA
tgtggtaggcagcctctacgatggtccccagtgatcctcgcctcccatca

SEQ ID NO: 2613 - DNA, 50 bp, synthetic construct
  source 1..50: mol_type = other DNA
cactgtaatcacttccctctgattatgagtatcagcagaagtagtgggtt

SEQ ID NO: 2614 - DNA, 50 bp, synthetic construct
  source 1..50: mol_type = other DNA
gtcacttccacaattaggttataaatagacgcggctctgtttagggtgca

SEQ ID NO: 2615 - DNA, 50 bp, synthetic construct
  source 1..50: mol_type = other DNA
cgctctcagttcactcactctaagagaagccagttgccatgttgggagtc

SEQ ID NO: 2616 - DNA, 50 bp, synthetic construct
  source 1..50: mol_type = other DNA
gccccatggagaagcccacatggcaaggagcatcagctccagccaaaagc

SEQ ID NO: 2617 - DNA, 50 bp, synthetic construct
  source 1..50: mol_type = other DNA; mol_type = other DNA
cacgtgaatgagctagacatggatcctcccctggtgaagccttgagatga

SEQ ID NO: 2618 - DNA, 50 bp, synthetic construct
  source 1..50: mol_type = other DNA; mol_type = other DNA
ctgcaaccccagccaacaccttcactgcagccatgtgagggacctgagcc

SEQ ID NO: 2619 - DNA, 50 bp, synthetic construct
  source 1..50: mol_type = other DNA; mol_type = other DNA
agactgcagctaaattgatcctggattcctgacccatagaaactgtacaa

SEQ ID NO: 2620 - DNA, 50 bp, synthetic construct
  source 1..50: mol_type = other DNA; mol_type = other DNA
ctataaatgtgttgttttaagctgctaaatgtaagtagcaataggtaact

SEQ ID NO: 2621 - skipped

SEQ ID NO: 2622 - DNA, 50 bp, synthetic construct
  source 1..50: mol_type = other DNA; mol_type = other DNA
tgtctccatggtccccaggccagtgctagtacataatgcgtgcttcagtg

SEQ ID NO: 2623 - DNA, 15 bp, synthetic construct
  source 1..15: mol_type = other DNA; mol_type = other DNA
agtgctcattgaatg

SEQ ID NO: 2624 - DNA, 50 bp, synthetic construct
  source 1..50: mol_type = other DNA; mol_type = other DNA
agtatctgagaattagtttaggtagacttgctgacaatttgatctcccgg

SEQ ID NO: 2625 - DNA, 12 bp, synthetic construct
  source 1..12: mol_type = other DNA; mol_type = other DNA
aaggagcaagca

SEQ ID NO: 2626 - DNA, 50 bp, synthetic construct
  source 1..50: mol_type = other DNA; mol_type = other DNA
gaatggctcccaagactccacactcactggaacccgtaaatatgatactc

SEQ ID NO: 2627 - DNA, 50 bp, synthetic construct
  source 1..50: mol_type = other DNA; mol_type = other DNA
ccctgactgtgctatgctatgttgtatggtacagttgaccttagagaggg

SEQ ID NO: 2628 - DNA, 50 bp, synthetic construct
  source 1..50: mol_type = other DNA; mol_type = other DNA
gaactctcttaggctggtggcagaaggcgaagtcagagagatttggagca

SEQ ID NO: 2629 - DNA, 50 bp, synthetic construct
  source 1..50: mol_type = other DNA; mol_type = other DNA
taagaaggacttgatgtgctgctgctggtttgaaaaagagagggccatat

SEQ ID NO: 2630 - DNA, 50 bp, synthetic construct
  source 1..50: mol_type = other DNA; mol_type = other DNA
aagaaggaatgccagtagtcttaaagtgctgagagacagccagccagtga

SEQ ID NO: 2631 - DNA, 50 bp, synthetic construct
  source 1..50: mol_type = other DNA; mol_type = other DNA
ggaatagggacctcagccctatgaccacaaggacagtaatctgcccacaa

SEQ ID NO: 2632 - DNA, 50 bp, synthetic construct
  source 1..50: mol_type = other DNA; mol_type = other DNA
agtgaacgagtttggaagcagattcttgcaatatgtctcatgcccacccc

SEQ ID NO: 2633 - DNA, 50 bp, synthetic construct
  source 1..50: mol_type = other DNA; mol_type = other DNA
caacaccttgatttcagtcttgtgagatcttgaaattagaattcagccaa

SEQ ID NO: 2634 - DNA, 50 bp, synthetic construct
  source 1..50: mol_type = other DNA; mol_type = other DNA
gccctcccagactcctgacctacagaaatgtgagctaataaatgggcatt

SEQ ID NO: 2635 - skipped

SEQ ID NO: 2636 - DNA, 50 bp, synthetic construct; identical to SEQ ID NO: 2338
  source 1..50: mol_type = other DNA; mol_type = other DNA

SEQ ID NO: 2637 - DNA, 50 bp, synthetic construct; identical to SEQ ID NO: 2339
  source 1..50: mol_type = other DNA; mol_type = other DNA

SEQ ID NO: 2638 - DNA, 50 bp, synthetic construct; identical to SEQ ID NO: 2340
  source 1..50: mol_type = other DNA; mol_type = other DNA

SEQ ID NO: 2639 - DNA, 50 bp, synthetic construct; identical to SEQ ID NO: 2341
  source 1..50: mol_type = other DNA; mol_type = other DNA

SEQ ID NO: 2640 - DNA, 41 bp, synthetic construct; identical to SEQ ID NO: 2342
  source 1..41: mol_type = other DNA; mol_type = other DNA

SEQ ID NO: 2641 - DNA, 50 bp, synthetic construct
  source 1..50: mol_type = other DNA; mol_type = other DNA
aagatacattatgaaatgcaagggacccagaaaactcacaacagtattga

SEQ ID NO: 2642 - DNA, 50 bp, synthetic construct
  source 1..50: mol_type = other DNA; mol_type = other DNA
agaaggagagtaaagctggaggactcacgcttcccaatttcaaaactaac

SEQ ID NO: 2643 - DNA, 50 bp, synthetic construct
  source 1..50: mol_type = other DNA; mol_type = other DNA
taccacactacaataatcaagactgtgtggtattggcataaggatagata

SEQ ID NO: 2644 - DNA, 50 bp, synthetic construct
  source 1..50: mol_type = other DNA; mol_type = other DNA
gatagatcaatggaatagaattgagagtacagaaataaactcatatattt

SEQ ID NO: 2645 - DNA, 50 bp, synthetic construct
  source 1..50: mol_type = other DNA; mol_type = other DNA
atggtcaattaatttttgacaagagtgccaagacaattcaatggagaaag

SEQ ID NO: 2646 - DNA, 50 bp, synthetic construct
  source 1..50: mol_type = other DNA; mol_type = other DNA
aatcgtcatttcaataaatgatgctgaaacaactatatattcatacgcaa

SEQ ID NO: 2647 - DNA, 50 bp, synthetic construct
  source 1..50: mol_type = other DNA; mol_type = other DNA
aagaatgaatttggatcccatacttacaccatattaaaaattttaaatgg

SEQ ID NO: 2648 - DNA, 50 bp, synthetic construct
  source 1..50: mol_type = other DNA; mol_type = other DNA
accaaattcctaaatgttagggccaaagtcatataactcttagaagaact

SEQ ID NO: 2649 - DNA, 50 bp, synthetic construct
  source 1..50: mol_type = other DNA; mol_type = other DNA
tgaagtaagtaatcgtttcttagatgtgatgtcaaaaccataagcaaaaa

SEQ ID NO: 2650 - DNA, 50 bp, synthetic construct
  source 1..50: mol_type = other DNA; mol_type = other DNA
aaaaaaaaaaaaaaaggaacaggtagataacttggatcttggatctcatc

SEQ ID NO: 2651 - DNA, 50 bp, synthetic construct
  source 1..50: mol_type = other DNA; mol_type = other DNA
atgggagatataattgcaaatcctatatctgataagagtctgatatctag

SEQ ID NO: 2652 - DNA, 27 bp, synthetic construct
  source 1..27: mol_type = other DNA; mol_type = other DNA
attagataaagaactctcataactcaa

SEQ ID NO: 2653 - DNA, 50 bp, synthetic construct
  source 1..50: mol_type = other DNA; mol_type = other DNA
tggtatggtttggctctgtgtccccacccagatctcacctagaattgtaa

SEQ ID NO: 2654 - DNA, 50 bp, synthetic construct
  source 1..50: mol_type = other DNA; mol_type = other DNA
tccccataatccccatgtgtcaagggcaggaccaggtggaggcagttgga

SEQ ID NO: 2655 - DNA, 50 bp, synthetic construct
  source 1..50: mol_type = other DNA; mol_type = other DNA
tcactgggagtggtttcccccatgctcttctcatgatagtgagttctcaa

SEQ ID NO: 2656 - DNA, 50 bp, synthetic construct
  source 1..50: mol_type = other DNA; mol_type = other DNA
tgagatctgatggttttataagtgtctgatgtttcccctgcttccattca

SEQ ID NO: 2657 - DNA, 50 bp, synthetic construct
  source 1..50: mol_type = other DNA; mol_type = other DNA
ctacatcctgccaccctgtgaagaaggtgcctgcttctcctttgccttct

SEQ ID NO: 2658 - DNA, 50 bp, synthetic construct
  source 1..50: mol_type = other DNA; mol_type = other DNA
gccatgattgtaagtttcctgaggcctcctcagcaatgtggaacagtgag

SEQ ID NO: 2659 - DNA, 50 bp, synthetic construct
  source 1..50: mol_type = other DNA; mol_type = other DNA
tcaattaaacctctttcctttataaattacccagtcttgggtatttcttc

SEQ ID NO: 2660 - DNA, 27 bp, synthetic construct
  source 1..27: mol_type = other DNA; mol_type = other DNA
atagcagtgtgagaatggactaataca

SEQ ID NO: 2661 - DNA, 50 bp, synthetic construct
  source 1..50: mol_type = other DNA; mol_type = other DNA
ggctgggtgcggtggctcacacctgtaatcccagcactttcggaggccga

SEQ ID NO: 2662 - DNA, 50 bp, synthetic construct
  source 1..50: mol_type = other DNA; mol_type = other DNA
ggtggggggatcacctgaggtcaggagttcaagaccagcctggccaacat

SEQ ID NO: 2663 - DNA, 50 bp, synthetic construct
  source 1..50: mol_type = other DNA; mol_type = other DNA
agtgaaaccccatctctactaaaaatacaaaaattaggcgagcgtggtgg

SEQ ID NO: 2664 - DNA, 50 bp, synthetic construct
  source 1..50: mol_type = other DNA; mol_type = other DNA
tgggtgcctgtaatcccagttacttgggaggctgaggcagaagaattgct

SEQ ID NO: 2665 - DNA, 50 bp, synthetic construct
  source 1..50: mol_type = other DNA; mol_type = other DNA
tgaacccaggaggtaaaggttgcagtgagctgagatcacgccactgtact

SEQ ID NO: 2666 - DNA, 50 bp, synthetic construct
  source 1..50: mol_type = other DNA; mol_type = other DNA
ccagcctgggtgacagagggagactgtctcaaaaaaaaaaaaaaaaaaga

SEQ ID NO: 2667 - DNA, 50 bp, synthetic construct
  source 1..50: mol_type = other DNA; mol_type = other DNA
tagatgaagcttgaaaacatgatgttggtgttaattgttgaggtctagtt

SEQ ID NO: 2668 - DNA, 50 bp, synthetic construct
  source 1..50: mol_type = other DNA; mol_type = other DNA
acagtggcatattatgaattttatacatgattcctttcatatgaaatttc

SEQ ID NO: 2669 - DNA, 50 bp, synthetic construct
  source 1..50: mol_type = other DNA; mol_type = other DNA
ccaaatacgcaaatccatagagtcagaaagtaggttagtggttgccaggg

SEQ ID NO: 2670 - DNA, 50 bp, synthetic construct
  source 1..50: mol_type = other DNA; mol_type = other DNA
gcaagcaggaggaaggggatagtgaagagtgacagctaatgcctatgggt

SEQ ID NO: 2671 - DNA, 50 bp, synthetic construct
  source 1..50: mol_type = other DNA; mol_type = other DNA
ttcttttgggggtgatgaacatgttttgagattagacagtcgtgatggtt

SEQ ID NO: 2672 - DNA, 50 bp, synthetic construct
  source 1..50: mol_type = other DNA; mol_type = other DNA
gcatagccttgtgcatatagtacaaaccactgaactatgcattttaaaaa

SEQ ID NO: 2673 - DNA, 33 bp, synthetic construct
  source 1..33: mol_type = other DNA; mol_type = other DNA
ggtgaattttatggttgtgagttatatcttaat

SEQ ID NO: 2674 - DNA, 50 bp, synthetic construct
  source 1..50: mol_type = other DNA; mol_type = other DNA
aaataaatgaaatataaaacataagcaataatgatgaacaatgatataaa

SEQ ID NO: 2675 - DNA, 50 bp, synthetic construct
  source 1..50: mol_type = other DNA; mol_type = other DNA
tttaaatgattctgacattgagaagataattagaaccacaaaatttatct

SEQ ID NO: 2676 - DNA, 50 bp, synthetic construct
  source 1..50: mol_type = other DNA; mol_type = other DNA
agatcatgccaaaaagtggtttattaaaagaagaagaaaattttctaata

SEQ ID NO: 2677 - DNA, 50 bp, synthetic construct
  source 1..50: mol_type = other DNA; mol_type = other DNA
gatttatggaaaagactcttgcatggtttaataatcccaccagtgaataa

SEQ ID NO: 2678 - DNA, 50 bp, synthetic construct
  source 1..50: mol_type = other DNA; mol_type = other DNA
tggcaaattacatgaacacattgggaaaagatttaaattttttgctgatc

SEQ ID NO: 2679 - DNA, 50 bp, synthetic construct
  source 1..50: mol_type = other DNA; mol_type = other DNA
tgttacaaactactggcatccacaaagatagcataaaattcataatatgc

SEQ ID NO: 2680 - DNA, 50 bp, synthetic construct
  source 1..50: mol_type = other DNA; mol_type = other DNA
cactataacaagacctcaacatcatcaacacaattattaaagaaacttgt

SEQ ID NO: 2681 - DNA, 50 bp, synthetic construct
  source 1..50: mol_type = other DNA; mol_type = other DNA
caattaaaaaatatttaaaattagtcaccacacaagaaaactcaaaatgc

SEQ ID NO: 2682 - DNA, 50 bp, synthetic construct
  source 1..50: mol_type = other DNA; mol_type = other DNA
cttgagtttttacagcccacagatgaaagaaacttgattgaggtttcctc

SEQ ID NO: 2683 - DNA, 50 bp, synthetic construct
  source 1..50: mol_type = other DNA; mol_type = other DNA
aaatttgacatcaattctaaaaatgtacatgacatttccaatagacttgt

SEQ ID NO: 2684 - DNA, 50 bp, synthetic construct
  source 1..50: mol_type = other DNA; mol_type = other DNA
gagcctgaaatttccttaaattatcaatggtacaaaacaagttttgatca

SEQ ID NO: 2685 - DNA, 50 bp, synthetic construct
  source 1..50: mol_type = other DNA; mol_type = other DNA
accatgttgaaggaaagactgaataatctctctattctctgtatagaaaa

SEQ ID NO: 2686 - DNA, 50 bp, synthetic construct
  source 1..50: mol_type = other DNA; mol_type = other DNA
tgatattataaaaccattgtcacatgaagaagcaatcaaagaatgtgcag

SEQ ID NO: 2687 - DNA, 23 bp, synthetic construct
  source 1..23: mol_type = other DNA; mol_type = other DNA
ccggatgcgggtggaaagaggta

SEQ ID NO: 2688 - DNA, 50 bp, synthetic construct
  source 1..50: mol_type = other DNA; mol_type = other DNA
cagaggctgatagactgtgaagacaataaagtttaagcttcagttcccct

SEQ ID NO: 2689 - DNA, 50 bp, synthetic construct
  source 1..50: mol_type = other DNA; mol_type = other DNA
ctctcgtatgagccccttctaaggtcctgggggaaaccctagaaatatgt

SEQ ID NO: 2690 - DNA, 50 bp, synthetic construct
  source 1..50: mol_type = other DNA; mol_type = other DNA
ctatatggtctagctacttttttaatttgccaaagtaaatcacttttaac

SEQ ID NO: 2691 - DNA, 50 bp, synthetic construct
  source 1..50: mol_type = other DNA; mol_type = other DNA
aattggttatgaccattgtctctttctgttctgacccttgtattgggtag

SEQ ID NO: 2692 - DNA, 50 bp, synthetic construct
  source 1..50: mol_type = other DNA; mol_type = other DNA
cactcatggggatgtttggatcagtcctatctaaaggtataaatttcatt

SEQ ID NO: 2693 - DNA, 21 bp, synthetic construct
  source 1..21: mol_type = other DNA; mol_type = other DNA
tgggtttagtggaatatattt

SEQ ID NO: 2694 - DNA, 50 bp, synthetic construct
  source 1..50: mol_type = other DNA; mol_type = other DNA
agcaaggcagccaagagtgcagtctctggagccctctgcctgggttcaga

SEQ ID NO: 2695 - skipped

SEQ ID NO: 2696 - DNA, 50 bp, synthetic construct
  source 1..50: mol_type = other DNA; mol_type = other DNA
catacctgcttctcctcctgaggtccctatctgtgtaatggcaccaccac

SEQ ID NO: 2697 - DNA, 50 bp, synthetic construct
  source 1..50: mol_type = other DNA
ttactcagaagcaaatcacggcctcaagtcagaagcaaaccagagcctgg

SEQ ID NO: 2698 - DNA, 30 bp, synthetic construct
  source 1..30: mol_type = other DNA
agtcatccaaggctcctcccttctctacac

SEQ ID NO: 2699 - DNA, 50 bp, synthetic construct
  source 1..50: mol_type = other DNA; mol_type = other DNA
gagtgggggctgaagtccagcctgctctctgcctgcctagtcatgatccc

SEQ ID NO: 2700 - DNA, 50 bp, synthetic construct
  source 1..50: mol_type = other DNA; mol_type = other DNA
tggtgcagggcaatgccccaggagagaaggggtacttttttctaattaca

SEQ ID NO: 2701 - DNA, 30 bp, synthetic construct
  source 1..30: mol_type = other DNA; mol_type = other DNA
cacagaccccctctaggatactgggaccct

SEQ ID NO: 2702 - DNA, 50 bp, synthetic construct
  source 1..50: mol_type = other DNA
tggcccaagccaattcaggatatgtcatacctcctctaagcaaccccagt

SEQ ID NO: 2703 - DNA, 50 bp, synthetic construct
  source 1..50: mol_type = other DNA
ggcttcctgaaagatctccctgtctcaagtcttgttctctcctacctatt

SEQ ID NO: 2704 - DNA, 50 bp, synthetic construct
  source 1..50: mol_type = other DNA
ctgctagcccaaactggcctttctaaaatacagaattatttgtatccttc

SEQ ID NO: 2705 - DNA, 50 bp, synthetic construct
  source 1..50: mol_type = other DNA
ccctgtttaaattcctgtgtggctccctactgccctcgagataaagtcca

SEQ ID NO: 2706 - DNA, 50 bp, synthetic construct
  source 1..50: mol_type = other DNA
gatgaggtccattgtggtcctgcctctgccattccatcttcctctggccc

SEQ ID NO: 2707 - DNA, 50 bp, synthetic construct
  source 1..50: mol_type = other DNA
ctccccatgggcacctgcagttccacaaaggcagttttctttctctcacc

SEQ ID NO: 2708 - DNA, 50 bp, synthetic construct
  source 1..50: mol_type = other DNA
cctggatctttgcacctgctgtttcctcagcttgtagcccctttctttgg

SEQ ID NO: 2709 - DNA, 50 bp, synthetic construct
  source 1..50: mol_type = other DNA
cccctctttcctgaccaactccttcaagattctcattaaagtttacctgt

SEQ ID NO: 2710 - DNA, 50 bp, synthetic construct
  source 1..50: mol_type = other DNA
ttgtctatatctcccccagaatagttagggaaccttcccctttgcttcta

SEQ ID NO: 2711 - DNA, 50 bp, synthetic construct
  source 1..50: mol_type = other DNA
tggcgttcccctgctacatgcacctccagtacagtacttaattcaacagg

SEQ ID NO: 2712 - DNA, 50 bp, synthetic construct
  source 1..50: mol_type = other DNA
atgtaaccagctgctaaaaggttccatcctagtcaaatgtttgtgtgctt

SEQ ID NO: 2713 - DNA, 50 bp, synthetic construct
  source 1..50: mol_type = other DNA
cccaagggcgggaactgcatccaacagtctctgttttcacccagcataag

SEQ ID NO: 2714 - DNA, 37 bp, synthetic construct
  source 1..37: mol_type = other DNA
acctggcatctgtggaatcaatgaattcatgaatgga

SEQ ID NO: 2715 - DNA, 50 bp, synthetic construct
  source 1..50: mol_type = other DNA
tgattctcagccttgaatgaacttcagaatcacttggggagcttttgaaa

SEQ ID NO: 2716 - DNA, 50 bp, synthetic construct
  source 1..50: mol_type = other DNA
aaaaataccaatacctggccctgggtatatggggcagaaacattaaatca

SEQ ID NO: 2717 - DNA, 27 bp, synthetic construct
  source 1..27: mol_type = other DNA
gaatatctagggggcgagctcagacat

SEQ ID NO: 2718 - DNA, 50 bp, synthetic construct
  source 1..50: mol_type = other DNA
aggcctttgcacctgctgttccttctgcctggaagttcaccgcagactat

SEQ ID NO: 2719 - DNA, 30 bp, synthetic construct
  source 1..30: mol_type = other DNA
ctctgagagctcagtctccactggccatcc

SEQ ID NO: 2720 - DNA, 50 bp, synthetic construct
  source 1..50: mol_type = other DNA
gttttacttatctgaaaaacagatgctaaagagtaggtaataggaaattg

SEQ ID NO: 2721 - DNA, 50 bp, synthetic construct
  source 1..50: mol_type = other DNA
tacttctctcttgctaaatatctggaatttctttaagaagtgtgtgtatt

SEQ ID NO: 2722 - DNA, 50 bp, synthetic construct
  source 1..50: mol_type = other DNA
tcatacgcctgttagctccccataaaacctgtgtcgacacgctgataacc

SEQ ID NO: 2723 - DNA, 50 bp, synthetic construct
  source 1..50: mol_type = other DNA
acacttgtggttggcccttgcgcctctgtctcgcccgctcctccagtcct

SEQ ID NO: 2724 - DNA, 50 bp, synthetic construct
  source 1..50: mol_type = other DNA
gccccatgtgtaaaacttcactgtcactctgacagaagtactttacaaac

SEQ ID NO: 2725 - DNA, 30 bp, synthetic construct
  source 1..30: mol_type = other DNA
tattagtctgcctttagacttcattaaaaa

SEQ ID NO: 2726 - DNA, 20 bp, synthetic construct
  source 1..20: mol_type = other DNA
ggtcccagggcctctttgaa

SEQ ID NO: 2727 - DNA, 50 bp, synthetic construct
  source 1..50: mol_type = other DNA
ctcatagcaccgctgagagtcaaatgagttgatgcgtgtgaagtgcttag

SEQ ID NO: 2728 - skipped

SEQ ID NO: 2729 - DNA, 50 bp, synthetic construct
  source 1..50: mol_type = other DNA
gcagaagtggcaagatgtcacttctggattaggttataaaagattgtggc

SEQ ID NO: 2730 - DNA, 50 bp, synthetic construct
  source 1..50: mol_type = other DNA
ttctgtcttgggtgtttgctggtattctctcttggctctctcactctggg

SEQ ID NO: 2731 - DNA, 50 bp, synthetic construct
  source 1..50: mol_type = other DNA
gaatgtcactgcacatgcaagaggcccatgtggtgagggacagagtcctg

SEQ ID NO: 2732 - DNA, 50 bp, synthetic construct
  source 1..50: mol_type = other DNA
ccaacaaccccgtgagtgaccttaaaagcagacccctccctggtccagcc

SEQ ID NO: 2733 - DNA, 50 bp, synthetic construct
  source 1..50: mol_type = other DNA
ttcagaagaaactgcagccccaggccacaccttgagtgcaacctcatggg

SEQ ID NO: 2734 - DNA, 50 bp, synthetic construct
  source 1..50: mol_type = other DNA
aaaatctgagccagaagaacccagctaaaccacacctggattcctgaccc

SEQ ID NO: 2735 - DNA, 50 bp, synthetic construct
  source 1..50: mol_type = other DNA
tcagaaactatgagataatgcatgtttgttgttgtttagagacagggtct

SEQ ID NO: 2736 - DNA, 50 bp, synthetic construct
  source 1..50: mol_type = other DNA
tgctctgtcacccaggctggagtgcagtggcataatcatagcccactaca

SEQ ID NO: 2737 - DNA, 50 bp, synthetic construct
  source 1..50: mol_type = other DNA
gcctcaagcgatcctcccacctcagcctcctaagtagctggaactacaga

SEQ ID NO: 2738 - DNA, 50 bp, synthetic construct
  source 1..50: mol_type = other DNA
tgcacatcaccacacctggctaatttttttctttttctttctttgtagag

SEQ ID NO: 2739 - DNA, 50 bp, synthetic construct
  source 1..50: mol_type = other DNA
acagggtctcactatgttgcccaggttggtctgaaactcctgggctcaag

SEQ ID NO: 2740 - DNA, 50 bp, synthetic construct
  source 1..50: mol_type = other DNA
caatcttcctgcctcagcctcccaaagtgctaggattacaggcatgagcc

SEQ ID NO: 2741 - DNA, 44 bp, synthetic construct
  source 1..44: mol_type = other DNA
accatacctgatctgttggttgttttttatgcagcaataggtaa

SEQ ID NO: 2742 - DNA, 20 bp, synthetic construct
  source 1..20: mol_type = other DNA
cttcagtgagtgctcattga

SEQ ID NO: 2743 - DNA, 50 bp, synthetic construct; identical to SEQ ID NO: 2624
  source 1..50: mol_type = other DNA

SEQ ID NO: 2744 - DNA, 20 bp, synthetic construct
  source 1..20: mol_type = other DNA
aaggagcaagcattcccaag

SEQ ID NO: 2745 - DNA, 50 bp, synthetic construct
  source 1..50: mol_type = other DNA
ccaacaccttgatctcaaccttgtgagactctaagcagagaacctagctc

SEQ ID NO: 2746 - DNA, 50 bp, synthetic construct
  source 1..50: mol_type = other DNA
agcagggccccagactcctgacctacagaaactgtgagatcataaatggg

SEQ ID NO: 2747 - DNA, 12 bp, synthetic construct
  source 1..12: mol_type = other DNA
tattgttttaag

SEQ ID NO: 2748 - DNA, 50 bp, synthetic construct
  source 1..50: mol_type = other DNA
tctctggctggtggcagaagggaaagtcagagacattcaaagaatgagaa

SEQ ID NO: 2749 - DNA, 50 bp, synthetic construct
  source 1..50: mol_type = other DNA
ggattttacacgagggaggttttctgttgctaagatggacctgagagcca

SEQ ID NO: 2750 - DNA, 50 bp, synthetic construct
  source 1..50: mol_type = other DNA
cttctagaaactgagagcagaccctggctgacagttaacaagacacttgg

SEQ ID NO: 2751 - DNA, 50 bp, synthetic construct
  source 1..50: mol_type = other DNA
gacctcagtcctaaaagcacaaggaaatgaattctgccaatagccaacaa

SEQ ID NO: 2752 - DNA, 50 bp, synthetic construct
  source 1..50: mol_type = other DNA
gcttgaaagaataccctgagacctagatgagaagcgcagctctgattgac

SEQ ID NO: 2753 - DNA, 50 bp, synthetic construct
  source 1..50: mol_type = other DNA
accttgatttcagtccagtgagacccggagcagagaatccagtgaggcca

SEQ ID NO: 2754 - DNA, 32 bp, synthetic construct
  source 1..32: mol_type = other DNA
tgactagatttccgacctacagaaattgtgag

SEQ ID NO: 2755 - DNA, 30 bp, synthetic construct
  source 1..30: mol_type = other DNA
acaagggaagtcagagatatttgaagcaca

SEQ ID NO: 2756 - DNA, 30 bp, synthetic construct
  source 1..30: mol_type = other DNA
agaaggacttgatgtgtccttgctggtttt

SEQ ID NO: 2757 - DNA, 40 bp, synthetic construct
  source 1..40: mol_type = other DNA
aatattcacttttgtacctaacctcctattctttttctta

SEQ ID NO: 2758 - DNA, 40 bp, synthetic construct
  source 1..40: mol_type = other DNA
tctaaataaatattcactttttaacctaattttgtattgg

SEQ ID NO: 2759 - DNA, 50 bp, synthetic construct
  source 1..50: mol_type = other DNA
taaataatttgtatccaactttgtagcatttttcaaattaccattcccta

SEQ ID NO: 2760 - DNA, 50 bp, synthetic construct
  source 1..50: mol_type = other DNA
ccagtgaagtgtgtagcaggtccagacatccagtattcacatggtaaatt

SEQ ID NO: 2761 - DNA, 50 bp, synthetic construct
  source 1..50: mol_type = other DNA
ctagaactctattaataatcctactgtatagcaagcctgcatgcacacac

SEQ ID NO: 2762 - DNA, 50 bp, synthetic construct
  source 1..50: mol_type = other DNA
atgccacataccatacacacaccaccgcccccctgcccccaacacacgca

SEQ ID NO: 2763 - DNA, 50 bp, synthetic construct
  source 1..50: mol_type = other DNA
cacagtgggggtaaactgctttctttgcctattctaaagctattctaaga

SEQ ID NO: 2764 - DNA, 50 bp, synthetic construct
  source 1..50: mol_type = other DNA
gaccaattcacatagaagtaaagacccagttgtacaaactgtggtaattt

SEQ ID NO: 2765 - DNA, 50 bp, synthetic construct
  source 1..50: mol_type = other DNA
tacaaaccatacactgtctgggcttccgctaaggaaatgctgtgattttc

SEQ ID NO: 2766 - DNA, 50 bp, synthetic construct
  source 1..50: mol_type = other DNA
atgttacacaagaaaaccaaagagggatcattctaatgcaaattggtcat

SEQ ID NO: 2767 - DNA, 50 bp, synthetic construct
  source 1..50: mol_type = other DNA
ttcaagccattcaccaatagaaggcttcttgaatagtgcaaaagttgagt

SEQ ID NO: 2768 - DNA, 50 bp, synthetic construct
  source 1..50: mol_type = other DNA
tgttaatacggcttgtttagttgcttttagttgtttctttttttcttttg

SEQ ID NO: 2769 - DNA, 50 bp, synthetic construct
  source 1..50: mol_type = other DNA
attatatggaaatgcaagggacccaacagctaaaacaatcttgaaaaaga

SEQ ID NO: 2770 - DNA, 50 bp, synthetic construct
  source 1..50: mol_type = other DNA
acacagttggaggactcactttcccaatttcaaaacttattataaggcta

SEQ ID NO: 2771 - DNA, 50 bp, synthetic construct
  source 1..50: mol_type = other DNA
cagtaatcaagacagtgtggtattggcctaattacaaaaatatagttcaa

SEQ ID NO: 2772 - DNA, 50 bp, synthetic construct
  source 1..50: mol_type = other DNA
tggaatagaattgaagaccctgaaaaataccttacatttatggtgaaata

SEQ ID NO: 2773 - DNA, 50 bp, synthetic construct
  source 1..50: mol_type = other DNA
attgatttttacaaaggtgccaagacaattcaacaacgtgggatggggcc

SEQ ID NO: 2774 - DNA, 50 bp, synthetic construct
  source 1..50: mol_type = other DNA
atggggtcagaaatcatcttttcaacaaatgattctgagataactggata

SEQ ID NO: 2775 - DNA, 50 bp, synthetic construct
  source 1..50: mol_type = other DNA
tccacatgcaaaagaataaagttagacccctatttaacaccatatacaaa

SEQ ID NO: 2776 - DNA, 50 bp, synthetic construct
  source 1..50: mol_type = other DNA
aattaactcaaaatggatcaataattcaaatgtaggaactaagacttcaa

SEQ ID NO: 2777 - DNA, 50 bp, synthetic construct
  source 1..50: mol_type = other DNA
aactcttagaaaaaactacagcagtaaatctttctgacctcaggttaggc

SEQ ID NO: 2778 - DNA, 50 bp, synthetic construct
  source 1..50: mol_type = other DNA
aatggtttcttagatatgacacctaaagtacaaacaatcaaataaaaaat

SEQ ID NO: 2779 - DNA, 50 bp, synthetic construct
  source 1..50: mol_type = other DNA
atatacatttttgacttcatataaatatttttctaccttaaccatttaaa

SEQ ID NO: 2780 - DNA, 50 bp, synthetic construct
  source 1..50: mol_type = other DNA
aagtaaaagaaaacccacaaacagggaggaaatatttgcaaattacatat

SEQ ID NO: 2781 - DNA, 10 bp, synthetic construct
  source 1..10: mol_type = other DNA
ctgataagga

SEQ ID NO: 2782 - DNA, 50 bp, synthetic construct
  source 1..50: mol_type = other DNA
tgatatggtttggctctgtgtccccacccaaatctcatcttgaattataa

SEQ ID NO: 2783 - DNA, 50 bp, synthetic construct
  source 1..50: mol_type = other DNA
tccccataatccccacatgtcaagggtgggaccagctggaggtaattgaa

SEQ ID NO: 2784 - DNA, 50 bp, synthetic construct
  source 1..50: mol_type = other DNA
tcatgggggcggtttccccatgctgttcttgtgataatgagtgcatctca

SEQ ID NO: 2785 - DNA, 50 bp, synthetic construct
  source 1..50: mol_type = other DNA
cgagatctggtggttttataagcatctggcatttcccctgcttggactca

SEQ ID NO: 2786 - DNA, 50 bp, synthetic construct
  source 1..50: mol_type = other DNA
ctccatcctgccacctttgaagaaggtgcctgcctcttctttgccttctg

SEQ ID NO: 2787 - DNA, 50 bp, synthetic construct
  source 1..50: mol_type = other DNA
ccatgattgtaagtttcctgaggcctccccagcaatgtggaactgtgagt

SEQ ID NO: 2788 - DNA, 50 bp, synthetic construct
  source 1..50: mol_type = other DNA
caattaaacctctttcctttataaattacccagtcttggatatttcttca

SEQ ID NO: 2789 - DNA, 30 bp, synthetic construct
  source 1..30: mol_type = other DNA
tagcagtgtgagaatggactaatacaactt

SEQ ID NO: 2790 - DNA, 50 bp, synthetic construct
  source 1..50: mol_type = other DNA
ggtgcggtggctcacgcctgtaatcccagcactttgggaggccaaggcag

SEQ ID NO: 2791 - DNA, 50 bp, synthetic construct
  source 1..50: mol_type = other DNA
atggatcacctgaggtcaggagttcgaggccagcctgaccaacatggcaa

SEQ ID NO: 2792 - DNA, 50 bp, synthetic construct
  source 1..50: mol_type = other DNA
aaccccatctctactaaaaatacaaaaattagccgggcgtggtggtgggt

SEQ ID NO: 2793 - DNA, 50 bp, synthetic construct
  source 1..50: mol_type = other DNA
gcctgtaattccagctactcaggaggctgagacagaagaattgcttgaac

SEQ ID NO: 2794 - DNA, 50 bp, synthetic construct
  source 1..50: mol_type = other DNA
ccaggaggtagaggttgcagtgagccaagatcgtgccactgcactccagc

SEQ ID NO: 2795 - DNA, 50 bp, synthetic construct
  source 1..50: mol_type = other DNA
ctgggcgacaagagtgaaacaccatctaaaaaacaaaacaaaacaaaaca

SEQ ID NO: 2796 - DNA, 50 bp, synthetic construct
  source 1..50: mol_type = other DNA
aaaaaagaaaacaatcctttgttcttcacaaataagcgtaatgtgttttt

SEQ ID NO: 2797 - DNA, 50 bp, synthetic construct
  source 1..50: mol_type = other DNA
tacagaggatccagttaaaagaattcattcagctgtgcgcagtggctcac

SEQ ID NO: 2798 - DNA, 50 bp, synthetic construct
  source 1..50: mol_type = other DNA
gtctgtaatctcagcactttgggaagccgaggcgggcggatcacttgagg

SEQ ID NO: 2799 - DNA, 50 bp, synthetic construct
  source 1..50: mol_type = other DNA
tcggagcctggccaacatggtgaactcccatctctactaaaaatacaaaa

SEQ ID NO: 2800 - DNA, 50 bp, synthetic construct
  source 1..50: mol_type = other DNA
attagctgggtgtggtggcacatgcctgtaatcgcagctacttgggaggc

SEQ ID NO: 2801 - DNA, 50 bp, synthetic construct
  source 1..50: mol_type = other DNA
tgaggcaggagaatcgcttgaacccaggaggcagaggtagcagtgtgccg

SEQ ID NO: 2802 - DNA, 50 bp, synthetic construct
  source 1..50: mol_type = other DNA
agatcacgccattgcactccagcctgggtgacagagcgaaactcttgtct

SEQ ID NO: 2803 - DNA, 19 bp, synthetic construct
  source 1..19: mol_type = other DNA
caaaaaaaaaaaaaaaaaa

SEQ ID NO: 2804 - DNA, 50 bp, synthetic construct
  source 1..50: mol_type = other DNA
ggctgggtgcagtggctcatgcctgtaatcccagcactttgggaggtcaa

SEQ ID NO: 2805 - DNA, 50 bp, synthetic construct
  source 1..50: mol_type = other DNA
ggcgggtggatcatttgaggtcaggagttcaagaccagcctggccaacat

SEQ ID NO: 2806 - DNA, 50 bp, synthetic construct
  source 1..50: mol_type = other DNA
ggtgaaaccctgtttctactaaaaatacaagaaaaaaaaaaagggctggg

SEQ ID NO: 2807 - DNA, 50 bp, synthetic construct
  source 1..50: mol_type = other DNA
tgcggtagctcacgcctgtaatcccagtactttgggaggccaaggcaggt

SEQ ID NO: 2808 - DNA, 50 bp, synthetic construct
  source 1..50: mol_type = other DNA
ggatcacctgaggacagaagttcgagaccagcctggccaacacggtgaaa

SEQ ID NO: 2809 - DNA, 50 bp, synthetic construct
  source 1..50: mol_type = other DNA
ctccgtctctactataaatacaaaaattagctgaatgtggtggcaggtgc

SEQ ID NO: 2810 - DNA, 50 bp, synthetic construct
  source 1..50: mol_type = other DNA
ctgtaatcccagttacttgggaggctgaggcaggagaatcgcttgaacct

SEQ ID NO: 2811 - DNA, 50 bp, synthetic construct
  source 1..50: mol_type = other DNA
gggaggcagaggttgcagtgagccaagatcacaccattgcactccagcct

SEQ ID NO: 2812 - DNA, 50 bp, synthetic construct
  source 1..50: mol_type = other DNA
gggcaacaagagtgaaactccgtctcaaaacaaaagcaaaaataattagc

SEQ ID NO: 2813 - DNA, 50 bp, synthetic construct
  source 1..50: mol_type = other DNA
tgggcatgatggtgcacgcctgtaatcccagctactggggaggctgaggc

SEQ ID NO: 2814 - DNA, 50 bp, synthetic construct
  source 1..50: mol_type = other DNA
aggagaatcacttgaacccaggagatggaggtcgcagtgagctgagatca

SEQ ID NO: 2815 - DNA, 50 bp, synthetic construct
  source 1..50: mol_type = other DNA
tgccactgcactccagcctgggaaacagagcgagactctgtctcaaaaaa

SEQ ID NO: 2816 - DNA, 14 bp, synthetic construct
  source 1..14: mol_type = other DNA
aaaaaaaaaaaaaa

SEQ ID NO: 2817 - DNA, 50 bp, synthetic construct
  source 1..50: mol_type = other DNA
ggtggctcacgcctataatctcagcactttcggaggccgaggtgggtgga

SEQ ID NO: 2818 - DNA, 50 bp, synthetic construct
  source 1..50: mol_type = other DNA
tcacttgaggtcaagagttcaagaccagcctagccaacatggtaaaaccc

SEQ ID NO: 2819 - DNA, 50 bp, synthetic construct
  source 1..50: mol_type = other DNA
cgtctctactaaaaatacaaaaattaggcgggcgtggtggtgggtgcctg

SEQ ID NO: 2820 - DNA, 50 bp, synthetic construct
  source 1..50: mol_type = other DNA
tagtcccagctacttgggaggctgaggcaggagaatcgcttgaacctggg

SEQ ID NO: 2821 - DNA, 50 bp, synthetic construct
  source 1..50: mol_type = other DNA
aggcggaagttgcagtgagctgagatcacaccactctactccagcctagg

SEQ ID NO: 2822 - DNA, 40 bp, synthetic construct
  source 1..40: mol_type = other DNA
caacagagtgagactctgcctcaaaaaaaaaaaaaaacaa

SEQ ID NO: 2823 - DNA, 50 bp, synthetic construct
  source 1..50: mol_type = other DNA
atatgaaatgtccagaataggcaaatccatagagacagaaagcagattaa

SEQ ID NO: 2824 - DNA, 50 bp, synthetic construct
  source 1..50: mol_type = other DNA
tggttgccaggggctgaggattggggaaggggttgggggtgcctgctaac

SEQ ID NO: 2825 - DNA, 50 bp, synthetic construct
  source 1..50: mol_type = other DNA
gggtacagggtttcactgtggagtgatgaaatgttctcgaattagacagt

SEQ ID NO: 2826 - DNA, 50 bp, synthetic construct
  source 1..50: mol_type = other DNA
ggtgatggttgcatattttgtgaatattaaagtgtactaaattgtatact

SEQ ID NO: 2827 - DNA, 50 bp, synthetic construct
  source 1..50: mol_type = other DNA
ctgagagagtgaattttatggaatgtgaactatatcttaatagaaatatc

SEQ ID NO: 2828 - DNA, 50 bp, synthetic construct
  source 1..50: mol_type = other DNA
aataggcaaatccatagggacagaaagcagaatagtggttaccaggggct

SEQ ID NO: 2829 - DNA, 50 bp, synthetic construct
  source 1..50: mol_type = other DNA
ggaggggtgagaggtgactgctaatgcatgtagggtttctttttgaggtg

SEQ ID NO: 2830 - DNA, 50 bp, synthetic construct
  source 1..50: mol_type = other DNA
atggaaatgttctggaattggataatggtgatggttgcacaactaaaaac

SEQ ID NO: 2831 - DNA, 10 bp, synthetic construct
  source 1..10: mol_type = other DNA
cactgaattt

SEQ ID NO: 2832 - DNA, 50 bp, synthetic construct
  source 1..50: mol_type = other DNA
tgactgctaatgggaggttcttttgggggtgatgaaaaatgctataaaaa

SEQ ID NO: 2833 - DNA, 50 bp, synthetic construct
  source 1..50: mol_type = other DNA
attgatttggtgatggttgtacaactttgtggatattctgaaaaccacta

SEQ ID NO: 2834 - DNA, 50 bp, synthetic construct
  source 1..50: mol_type = other DNA
aactgtacacttttaaaaggtgaattttatggtatgtgaattatatctca

SEQ ID NO: 2835 - DNA, 50 bp, synthetic construct
  source 1..50: mol_type = other DNA
tgatcaaccatactacaggaaagactgaattccttttttattcttgtttt

SEQ ID NO: 2836 - DNA, 50 bp, synthetic construct
  source 1..50: mol_type = other DNA
agaaactacaacacaaaagcactgtcatacaaagagcaatcaaagaatgt

SEQ ID NO: 2837 - DNA, 10 bp, synthetic construct
  source 1..10: mol_type = other DNA
gcaaataaaa

SEQ ID NO: 2838 - DNA, 50 bp, synthetic construct
  source 1..50: mol_type = other DNA
tgaaggaaagactgaattatctttctattctctctatagacaaattatga

SEQ ID NO: 2839 - DNA, 40 bp, synthetic construct
  source 1..40: mol_type = other DNA
ataaaattcataatatgccactgtaactagacctcaacaa

SEQ ID NO: 2840 - DNA, 50 bp, synthetic construct
  source 1..50: mol_type = other DNA
tgccaaagtaaaatacttaaaccaaatttggttaagatttttgtcaactc

SEQ ID NO: 2841 - DNA, 50 bp, synthetic construct
  source 1..50: mol_type = other DNA
taacttccccttctcatggtactggagtagccgtgagcaattttggaatc

SEQ ID NO: 2842 - DNA, 50 bp, synthetic construct
  source 1..50: mol_type = other DNA
caagctaaacggaagatgagttgaggatttgttcagtttgggtttagtgg

SEQ ID NO: 2843 - DNA, 10 bp, synthetic construct
  source 1..10: mol_type = other DNA
aatatatgta

SEQ ID NO: 2844 - DNA, 20 bp, synthetic construct
  source 1..20: mol_type = other DNA
tgtttggatcagtcctatct

SEQ ID NO: 2845 - DNA, 20 bp, synthetic construct
  source 1..20: mol_type = other DNA
gggggaaaccctagaaatat

SEQ ID NO: 2846 - DNA, 40 bp, synthetic construct
  source 1..40: mol_type = other DNA
gagccctgcagcctgggttcagatcctggctttgctgcat

SEQ ID NO: 2847 - DNA, 20 bp, synthetic construct
  source 1..20: mol_type = other DNA
ggcctcaagtcagaagcaaa

SEQ ID NO: 2848 - DNA, 30 bp, synthetic construct
  source 1..30: mol_type = other DNA
gtgagtggggctgaagtccagcctgccctt

SEQ ID NO: 2849 - DNA, 30 bp, synthetic construct
  source 1..30: mol_type = other DNA
gaggaggtgagtgggggctgaacagcactt

SEQ ID NO: 2850 - DNA, 40 bp, synthetic construct
  source 1..40: mol_type = other DNA
aagcaaaccccagtggcttcctgtggaaagatgggcaggg

SEQ ID NO: 2851 - DNA, 30 bp, synthetic construct
  source 1..30: mol_type = other DNA
ctttgcacctgctgtttcctctgcctgaaa

SEQ ID NO: 2852 - DNA, 40 bp, synthetic construct
  source 1..40: mol_type = other DNA
cagaatcacttgggagcttttgaaaaatttcaatacctgg

SEQ ID NO: 2853 - DNA, 50 bp, synthetic construct
  source 1..50: mol_type = other DNA
cctcctcttgcattgccctgcacaatctccacattcacgtccggtagcct

SEQ ID NO: 2854 - DNA, 50 bp, synthetic construct
  source 1..50: mol_type = other DNA
cactagtactcatcttccttcagttctcagttcagatgtcagttcttcag

SEQ ID NO: 2855 - DNA, 50 bp, synthetic construct
  source 1..50: mol_type = other DNA
gaggccttctggaatgtctcaggccaggttaagtgtctcacttgagctcc

SEQ ID NO: 2856 - DNA, 50 bp, synthetic construct
  source 1..50: mol_type = other DNA
cacgaccctacaaccctctgagatttcgtaggtgtattacatcacatctt

SEQ ID NO: 2857 - DNA, 50 bp, synthetic construct
  source 1..50: mol_type = other DNA
ctgccttatttgactcttgttcgtttccctgtcggacagtcttagaaggt

SEQ ID NO: 2858 - DNA, 50 bp, synthetic construct
  source 1..50: mol_type = other DNA
gggaccttgactattttattacattcccagtgcccagcttagtgcctggc

SEQ ID NO: 2859 - DNA, 37 bp, synthetic construct
  source 1..37: mol_type = other DNA
acagggaactccttagaaaatatgtttgttgaatgaa

SEQ ID NO: 2860 - DNA, 50 bp, synthetic construct
  source 1..50: mol_type = other DNA
aaggagttccctgtgccaggcactaagctgggcactgggaatgtaataaa

SEQ ID NO: 2861 - DNA, 50 bp, synthetic construct
  source 1..50: mol_type = other DNA
atagtcaaggtcccaccttctaagactgtccgacagggaaacgaacaaga

SEQ ID NO: 2862 - DNA, 50 bp, synthetic construct
  source 1..50: mol_type = other DNA
gtcaaataaggcagaagatgtgatgtaatacacctacgaaatctcagagg

SEQ ID NO: 2863 - DNA, 50 bp, synthetic construct
  source 1..50: mol_type = other DNA
gttgtagggtcgtgggagctcaagtgagacacttaacctggcctgagaca

SEQ ID NO: 2864 - DNA, 50 bp, synthetic construct
  source 1..50: mol_type = other DNA
ttccagaaggcctcctgaagaactgacatctgaactgagaactgaaggaa

SEQ ID NO: 2865 - DNA, 50 bp, synthetic construct
  source 1..50: mol_type = other DNA
gatgagtactagtgaggctaccggacgtgaatgtggagattgtgcagggc

SEQ ID NO: 2866 - DNA, 50 bp, synthetic construct
  source 1..50: mol_type = other DNA
aatgcaagaggaggctgtagaagtcaacctggctagatcacagcggggtg

SEQ ID NO: 2867 - DNA, 50 bp, synthetic construct
  source 1..50: mol_type = other DNA
tatgtggggcagaagcttctttgtttgaatttgctcctgagaggatgagg

SEQ ID NO: 2868 - DNA, 50 bp, synthetic construct
  source 1..50: mol_type = other DNA
cctcctagagcactggctcctggacagcaacctcctttggtgccttgtga

SEQ ID NO: 2869 - DNA, 50 bp, synthetic construct
  source 1..50: mol_type = other DNA
ccagggccctgatggttcattagatggagccttcgagtcttagggagttg

SEQ ID NO: 2870 - DNA, 43 bp, synthetic construct
  source 1..43: mol_type = other DNA
ccgcagggtccccacagcaggctcccgacggttgtgaaccagc

SEQ ID NO: 2871 - DNA, 50 bp, synthetic construct
  source 1..50: mol_type = other DNA
actagtactcatcttccttcagttctcagttcagatgtcagttcttcagg

SEQ ID NO: 2872 - DNA, 50 bp, synthetic construct
  source 1..50: mol_type = other DNA
aggccttctggaatgtctcaggccaggttaagtgtctcacttgagctccc

SEQ ID NO: 2873 - DNA, 50 bp, synthetic construct
  source 1..50: mol_type = other DNA
acgaccctacaaccctctgagatttcgtaggtgtattacatcacatcttc

SEQ ID NO: 2874 - DNA, 50 bp, synthetic construct
  source 1..50: mol_type = other DNA
tgccttatttgactcttgttcgtttccctgtcggacagtcttagaaggtg

SEQ ID NO: 2875 - DNA, 50 bp, synthetic construct
  source 1..50: mol_type = other DNA
ggaccttgactattttattacattcccagtgcccagcttagtgcctggca

SEQ ID NO: 2876 - DNA, 36 bp, synthetic construct
  source 1..36: mol_type = other DNA
cagggaactccttagaaaatatgtttgttgaatgaa

SEQ ID NO: 2877 - skipped

SEQ ID NO: 2878 - DNA, 50 bp, synthetic construct
  source 1..50: mol_type = other DNA
cctagatgatcttatccagacctgtggcttttaatatagttttaatcctg

SEQ ID NO: 2879 - DNA, 50 bp, synthetic construct
  source 1..50: mol_type = other DNA
aagttatttttctttgttaacctatacctcttgccagaaccgtatagtgg

SEQ ID NO: 2880 - DNA, 50 bp, synthetic construct
  source 1..50: mol_type = other DNA
catattcatttgtccattctgtcttcacttaggtatatgataatcgtcag

SEQ ID NO: 2881 - skipped

SEQ ID NO: 2882 - DNA, 50 bp, synthetic construct
  source 1..50: mol_type = other DNA
ctcctctactttaaacttttcaatggcttctaactttatgtagattaaaa

SEQ ID NO: 2883 - DNA, 50 bp, synthetic construct
  source 1..50: mol_type = other DNA
tacaaattcctcatcctgctttacaaagcccactatgctgtagccagcca

SEQ ID NO: 2884 - DNA, 50 bp, synthetic construct
  source 1..50: mol_type = other DNA
ctctgtatttcatcagtctctgaattggccaaacttattccttttgcagc

SEQ ID NO: 2885 - DNA, 50 bp, synthetic construct
  source 1..50: mol_type = other DNA
tgtttcttttgcttggaatgcttttgtacatgatctttgtgtggcttaaa

SEQ ID NO: 2886 - DNA, 50 bp, synthetic construct
  source 1..50: mol_type = other DNA
tgtcagcccctcagacacctcgttacccagtcatattacatcaccgctta

SEQ ID NO: 2887 - DNA, 50 bp, synthetic construct
  source 1..50: mol_type = other DNA
ttttctgtagcaccctcaccactatttcatctttcagcccatctccagtg

SEQ ID NO: 2888 - DNA, 50 bp, synthetic construct
  source 1..50: mol_type = other DNA
ctgcaacgtggacttcctgaaagcagagatcttttttttttttttctcac

SEQ ID NO: 2889 - DNA, 50 bp, synthetic construct
  source 1..50: mol_type = other DNA
tgctgtctagttcgccctcaaacagtgcctgacttatagaagtgctcagt

SEQ ID NO: 2890 - DNA, 25 bp, synthetic construct
  source 1..25: mol_type = other DNA
aaataacagtgattaaatgaatgaa

SEQ ID NO: 2891 - DNA, 50 bp, synthetic construct
  source 1..50: mol_type = other DNA
tggttctcaagctaggaagatagtgcccacagggcaaatgtctggaaaca

SEQ ID NO: 2892 - DNA, 50 bp, synthetic construct
  source 1..50: mol_type = other DNA
cttttggctatcacaactgggtggatgctactgacatcttttgggtagaa

SEQ ID NO: 2893 - DNA, 50 bp, synthetic construct
  source 1..50: mol_type = other DNA
gtcagagttgctgattaacataagacacaggaaagtccctcacaaagaat

SEQ ID NO: 2894 - DNA, 42 bp, synthetic construct
  source 1..42: mol_type = other DNA
tatctggccacaacctatcaatactgctgagtttaagaaacc

SEQ ID NO: 2895 - DNA, 50 bp, synthetic construct
  source 1..50: mol_type = other DNA
tctccttttttcttctttggccatttcccaatctcctttgctgattcctt

SEQ ID NO: 2896 - DNA, 50 bp, synthetic construct
  source 1..50: mol_type = other DNA
ctcaaccttgaaatgctagagtgccctacggctctgtccctggccatatt

SEQ ID NO: 2897 - DNA, 50 bp, synthetic construct
  source 1..50: mol_type = other DNA
caagcccatgacatcaaataccatccttgtaatggtgacttatttctcta

SEQ ID NO: 2898 - DNA, 50 bp, synthetic construct
  source 1..50: mol_type = other DNA
attctggcctagaacattccccaaaagtaacagcctaaacttcacatggc

SEQ ID NO: 2899 - DNA, 50 bp, synthetic construct
  source 1..50: mol_type = other DNA
cccccaaaaaaactccccctccccaaaaccaccatccccagtcttcctat

SEQ ID NO: 2900 - DNA, 50 bp, synthetic construct
  source 1..50: mol_type = other DNA
atcaagcaaaaaaattcagttatatggattcttcctaatctactcattcc

SEQ ID NO: 2901 - DNA, 50 bp, synthetic construct
  source 1..50: mol_type = other DNA
tactgaccttctccatctcatatccatccaactcctaccaccctgactcc

SEQ ID NO: 2902 - DNA, 50 bp, synthetic construct
  source 1..50: mol_type = other DNA
cacccttatgcaaatcattaaatcttgcctatattaccataatagctgta

SEQ ID NO: 2903 - DNA, 50 bp, synthetic construct
  source 1..50: mol_type = other DNA
atttgtctttccacttccctaaaatcttgttttcacacagcagacacagt

SEQ ID NO: 2904 - DNA, 23 bp, synthetic construct
  source 1..23: mol_type = other DNA
gatctttccaaaatgtaaatcag

SEQ ID NO: 2905 - DNA, 50 bp, synthetic construct
  source 1..50: mol_type = other DNA
ctttttttttttattgagatggagtcccaggctggagtgcaatggtgcga

SEQ ID NO: 2906 - DNA, 50 bp, synthetic construct
  source 1..50: mol_type = other DNA
tctcggctcactgcaggctccacctcccaggttcaaatgattctcctgcc

SEQ ID NO: 2907 - DNA, 50 bp, synthetic construct
  source 1..50: mol_type = other DNA
tcagcctcccgagtagctgggatttcaggtgcccgccactacacctggct

SEQ ID NO: 2908 - DNA, 50 bp, synthetic construct
  source 1..50: mol_type = other DNA
attttttgtatttttagtagagacagggttttaccacgttggccaggctg

SEQ ID NO: 2909 - DNA, 50 bp, synthetic construct
  source 1..50: mol_type = other DNA
gtcttgaactcctgacctcgtgatccacccgccttggcctccaaagtgct

SEQ ID NO: 2910 - DNA, 50 bp, synthetic construct
  source 1..50: mol_type = other DNA
ggaattacaggcgtgagccactgcgcctggccccttgtctctatcttgat

SEQ ID NO: 2911 - DNA, 50 bp, synthetic construct
  source 1..50: mol_type = other DNA
gtctcagcagcattcattactattgattcatgtctttacgctctcctatt

SEQ ID NO: 2912 - DNA, 50 bp, synthetic construct
  source 1..50: mol_type = other DNA
ttctttttttattttggttttgtcacagaatatcactctgtcgcccaggc

SEQ ID NO: 2913 - DNA, 50 bp, synthetic construct
  source 1..50: mol_type = other DNA
tggagtgcagtggtgcgatgtcggctcactgcaacctccgcctcccaggt

SEQ ID NO: 2914 - DNA, 50 bp, synthetic construct
  source 1..50: mol_type = other DNA
tcaagcgattctcctgtctcaccctcccaagtagctggtattacaggccc

SEQ ID NO: 2915 - DNA, 50 bp, synthetic construct
  source 1..50: mol_type = other DNA
agctaatttttgtatttttagtagagacagcgtttcgccatgttggccag

SEQ ID NO: 2916 - DNA, 50 bp, synthetic construct
  source 1..50: mol_type = other DNA
gctggtcttgaacttctgatctcaggtgatctgcccaccttggcctcccc

SEQ ID NO: 2917 - DNA, 37 bp, synthetic construct
  source 1..37: mol_type = other DNA
atgtgctgggattacagccgtgactcactgcgcctgg

SEQ ID NO: 2918 - DNA, 50 bp, synthetic construct
  source 1..50: mol_type = other DNA
ggccaggcgcagtggctcacgcctgtaattccagcactttggaggccaag

SEQ ID NO: 2919 - DNA, 50 bp, synthetic construct
  source 1..50: mol_type = other DNA
gcgggtggatcacgaggtcaggagttcaagaccagcctggccaacgtggt

SEQ ID NO: 2920 - DNA, 50 bp, synthetic construct
  source 1..50: mol_type = other DNA
aaaaccctgtctctactaaaaatacaaaaaatagccaggtgtagtggcgg

SEQ ID NO: 2921 - DNA, 50 bp, synthetic construct
  source 1..50: mol_type = other DNA
gcacctgaaatcccagctactcgggaggctgaggcaggagaatcatttga

SEQ ID NO: 2922 - DNA, 50 bp, synthetic construct
  source 1..50: mol_type = other DNA
acctgggaggtggagcctgcagtgagccgagatcgcaccattgcactcca

SEQ ID NO: 2923 - DNA, 31 bp, synthetic construct
  source 1..31: mol_type = other DNA
gcctgggactccatctcaataaaaaaaaaaa

SEQ ID NO: 2924 - DNA, 50 bp, synthetic construct
  source 1..50: mol_type = other DNA
ggccaggcgcagtgagtcacggctgtaatcccagcacatggggaggccaa

SEQ ID NO: 2925 - DNA, 50 bp, synthetic construct
  source 1..50: mol_type = other DNA
ggtgggcagatcacctgagatcagaagttcaagaccagcctggccaacat

SEQ ID NO: 2926 - DNA, 50 bp, synthetic construct
  source 1..50: mol_type = other DNA
ggcgaaacgctgtctctactaaaaatacaaaaattagctgggcctgtaat

SEQ ID NO: 2927 - DNA, 50 bp, synthetic construct
  source 1..50: mol_type = other DNA
accagctacttgggagggtgagacaggagaatcgcttgaacctgggaggc

SEQ ID NO: 2928 - DNA, 50 bp, synthetic construct
  source 1..50: mol_type = other DNA
ggaggttgcagtgagccgacatcgcaccactgcactccagcctgggcgac

SEQ ID NO: 2929 - DNA, 41 bp, synthetic construct
  source 1..41: mol_type = other DNA
agagtgatattctgtgacaaaaccaaaataaaaaaagaaaa

SEQ ID NO: 2930 - DNA, 50 bp, synthetic construct
  source 1..50: mol_type = other DNA
atccccctgccttgttcacactatcacctccaaaatctgatcaccccctt

SEQ ID NO: 2931 - DNA, 50 bp, synthetic construct
  source 1..50: mol_type = other DNA
accccttccagctcagctactttgatttcaatgtacattaacatcacccc

SEQ ID NO: 2932 - DNA, 50 bp, synthetic construct
  source 1..50: mol_type = other DNA
cttataaatatttttacctcctttatctcctcccattgtcccactttcct

SEQ ID NO: 2933 - DNA, 50 bp, synthetic construct
  source 1..50: mol_type = other DNA
ggttaaacccaacttgcttgcacttgggagggaaaacagagccatgctga

SEQ ID NO: 2934 - DNA, 50 bp, synthetic construct
  source 1..50: mol_type = other DNA
tagtttaaattcatggccacagattttaaaaggtaccaaatactgcctgg

SEQ ID NO: 2935 - DNA, 50 bp, synthetic construct
  source 1..50: mol_type = other DNA
acattttggctcattttttccactcttcagaacttctcttcctttccttg

SEQ ID NO: 2936 - DNA, 50 bp, synthetic construct
  source 1..50: mol_type = other DNA
ctatcttcttctgacactgcctaatgtttcattgaaaagtagaggtcatt

SEQ ID NO: 2937 - DNA, 50 bp, synthetic construct
  source 1..50: mol_type = other DNA
aaacagaactctctcatcttcccaccaccattcctcctaacccacctgca

SEQ ID NO: 2938 - DNA, 50 bp, synthetic construct
  source 1..50: mol_type = other DNA
tctgtggccacttttcttcctcttgtaatagatgaaaaggttcctgctcc

SEQ ID NO: 2939 - DNA, 50 bp, synthetic construct
  source 1..50: mol_type = other DNA
tatcaaaagccatcttaccagctgtactctgcatcctagcctctcttgtc

SEQ ID NO: 2940 - DNA, 50 bp, synthetic construct
  source 1..50: mol_type = other DNA
ttctctagacttccctactgtaactatcttctcttgcatcatcagctccc

SEQ ID NO: 2941 - DNA, 50 bp, synthetic construct
  source 1..50: mol_type = other DNA
cctctctactgaatcatcccgttagtgtacaaacatgctctagtatatta

SEQ ID NO: 2942 - DNA, 50 bp, synthetic construct
  source 1..50: mol_type = other DNA
ctatcaaaacactcccttacttcatgttccattttcagatactgtcccat

SEQ ID NO: 2943 - DNA, 50 bp, synthetic construct
  source 1..50: mol_type = other DNA
ttcttatctctgcagcagcatttgagtgagctctttatagtcactctctc

SEQ ID NO: 2944 - DNA, 50 bp, synthetic construct
  source 1..50: mol_type = other DNA
tacttttcacattctctcctcagcccattccagctgtttctgttctcact

SEQ ID NO: 2945 - DNA, 50 bp, synthetic construct
  source 1..50: mol_type = other DNA
actgcagagacttgctcttgttatgatcacgagtgactgctatgtttgtc

SEQ ID NO: 2946 - DNA, 24 bp, synthetic construct
  source 1..24: mol_type = other DNA
aaatctactggttccttgtcgctc

SEQ ID NO: 2947 - DNA, 50 bp, synthetic construct
  source 1..50: mol_type = other DNA
gctgtttttattaaattgagaactaccggatgagatagatgcagctatga

SEQ ID NO: 2948 - DNA, 50 bp, synthetic construct
  source 1..50: mol_type = other DNA
agagttgaaggaacatgtactaggtcgaggttagagcagtgcccaagaag

SEQ ID NO: 2949 - DNA, 50 bp, synthetic construct
  source 1..50: mol_type = other DNA
caggaaaacttttgatttgttcaagagacagtaatgaggcctgtatggct

SEQ ID NO: 2950 - DNA, 50 bp, synthetic construct
  source 1..50: mol_type = other DNA
aaaaattattaccactgaagaaagtagtatgagctatcattagagaggta

SEQ ID NO: 2951 - DNA, 50 bp, synthetic construct
  source 1..50: mol_type = other DNA
ccccttaccccttccagctcagctactttgatttcaatgtacattaacat

SEQ ID NO: 2952 - DNA, 50 bp, synthetic construct
  source 1..50: mol_type = other DNA
cacccccttataaatatttttacctcctttatctcctcccattgtcccac

SEQ ID NO: 2953 - DNA, 50 bp, synthetic construct
  source 1..50: mol_type = other DNA
tttcctggttaaacccaacttgcttgcacttgggagggaaaacagagcca

SEQ ID NO: 2954 - DNA, 50 bp, synthetic construct
  source 1..50: mol_type = other DNA
tgctgatagtttaaattcatggccacagattttaaaaggtaccaaatact

SEQ ID NO: 2955 - DNA, 50 bp, synthetic construct
  source 1..50: mol_type = other DNA
gcctggacattttggctcattttttccactcttcagaacttctcttcctt

SEQ ID NO: 2956 - DNA, 50 bp, synthetic construct
  source 1..50: mol_type = other DNA
tccttgctatcttcttctgacactgcctaatgtttcattgaaaagtagag

SEQ ID NO: 2957 - DNA, 50 bp, synthetic construct
  source 1..50: mol_type = other DNA
gtcattaaacagaactctctcatcttcccaccaccattcctcctaaccca

SEQ ID NO: 2958 - DNA, 50 bp, synthetic construct
  source 1..50: mol_type = other DNA
cctgcatctgtggccacttttcttcctcttgtaatagatgaaaaggttcc

SEQ ID NO: 2959 - DNA, 50 bp, synthetic construct
  source 1..50: mol_type = other DNA
tgctcctatcaaaagccatcttaccagctgtactctgcatcctagcctct

SEQ ID NO: 2960 - DNA, 50 bp, synthetic construct
  source 1..50: mol_type = other DNA
cttgtcttctctagacttccctactgtaactatcttctcttgcatcatca

SEQ ID NO: 2961 - DNA, 50 bp, synthetic construct
  source 1..50: mol_type = other DNA
gctccccctctctactgaatcatcccgttagtgtacaaacatgctctagt

SEQ ID NO: 2962 - DNA, 50 bp, synthetic construct
  source 1..50: mol_type = other DNA
atattactatcaaaacactcccttacttcatgttccattttcagatactg

SEQ ID NO: 2963 - DNA, 50 bp, synthetic construct
  source 1..50: mol_type = other DNA
tcccatttcttatctctgcagcagcatttgagtgagctctttatagtcac

SEQ ID NO: 2964 - DNA, 50 bp, synthetic construct
  source 1..50: mol_type = other DNA
tctctctacttttcacattctctcctcagcccattccagctgtttctgtt

SEQ ID NO: 2965 - DNA, 50 bp, synthetic construct
  source 1..50: mol_type = other DNA
ctcactactgcagagacttgctcttgttatgatcacgagtgactgctatg

SEQ ID NO: 2966 - DNA, 26 bp, synthetic construct
  source 1..26: mol_type = other DNA
tttgtcaaatctactggttccttgtc

SEQ ID NO: 2967 - DNA, 50 bp, synthetic construct
  source 1..50: mol_type = other DNA
ctaaaagtaaacttttgacttttgtcttccagtcttctttctgttagtgg

SEQ ID NO: 2968 - DNA, 50 bp, synthetic construct
  source 1..50: mol_type = other DNA
ttcccattactaagtcagaaactacgagtcaccttgacttctctcttcct

SEQ ID NO: 2969 - DNA, 50 bp, synthetic construct
  source 1..50: mol_type = other DNA
cactctcaatccactcctgttgctacttcctcctaagtaaatctcagact

SEQ ID NO: 2970 - DNA, 50 bp, synthetic construct
  source 1..50: mol_type = other DNA
actccattcccctcgtctactcttttaccctagtccatgccagcattatc

SEQ ID NO: 2971 - DNA, 50 bp, synthetic construct
  source 1..50: mol_type = other DNA
tctttcctgaactactcaacctctcaactggtgttcctgccaccactgtt

SEQ ID NO: 2972 - DNA, 50 bp, synthetic construct
  source 1..50: mol_type = other DNA
gacctgttttcatcagtttttcacagagcatacatgtttaaaaataagtc

SEQ ID NO: 2973 - DNA, 50 bp, synthetic construct
  source 1..50: mol_type = other DNA
tggtcacatcaccccttgcttttacaaacctgcagtggcttcccagtacc

SEQ ID NO: 2974 - DNA, 50 bp, synthetic construct
  source 1..50: mol_type = other DNA
attgactcaagatcaaactcttccaaagccccacagggtctggaccctct

SEQ ID NO: 2975 - DNA, 50 bp, synthetic construct
  source 1..50: mol_type = other DNA
gcttacctctctaatgatagctcatactactttcttcagtggtaataatt

SEQ ID NO: 2976 - DNA, 50 bp, synthetic construct
  source 1..50: mol_type = other DNA
tttagccatacaggcctcattactgtctcttgaacaaatcaaaagttttc

SEQ ID NO: 2977 - DNA, 50 bp, synthetic construct
  source 1..50: mol_type = other DNA
ctgcttcttgggcactgctctaacctcgacctagtacatgttccttcaac

SEQ ID NO: 2978 - DNA, 43 bp, synthetic construct
  source 1..43: mol_type = other DNA
tcttcatagctgcatctatctcatccggtagttctcaatttaa

SEQ ID NO: 2979 - DNA, 50 bp, synthetic construct
  source 1..50: mol_type = other DNA
ctcacttgctatgtgactttcagcaagttactttcaactagagcttaggt

SEQ ID NO: 2980 - DNA, 50 bp, synthetic construct
  source 1..50: mol_type = other DNA
tcctcttctgtaaaatggggatgaatataatgccacttatttcacaaggt

SEQ ID NO: 2981 - DNA, 28 bp, synthetic construct
  source 1..28: mol_type = other DNA
tgcaatgaagattaggaatacaggtaca

SEQ ID NO: 2982 - DNA, 50 bp, synthetic construct
  source 1..50: mol_type = other DNA
ggctgagtgtggtgacacatgcctctaatcccagcacactgggaggcaga

SEQ ID NO: 2983 - DNA, 50 bp, synthetic construct
  source 1..50: mol_type = other DNA
ggcaggaggatcgcttgagcccaggagtttgagagcagcctgagcagcat

SEQ ID NO: 2984 - DNA, 30 bp, synthetic construct
  source 1..30: mol_type = other DNA
actaagaccctcttaaaaaaaaaaaaaaaa

SEQ ID NO: 2985 - DNA, 50 bp, synthetic construct
  source 1..50: mol_type = other DNA
aacttaaatgtacctcagaaggccttccttgaacacttagtctagatagg

SEQ ID NO: 2986 - DNA, 50 bp, synthetic construct
  source 1..50: mol_type = other DNA
ttctcccatttctctttattgcataaaccattttatttcttggtagcatg

SEQ ID NO: 2987 - DNA, 50 bp, synthetic construct
  source 1..50: mol_type = other DNA
taacataatttagtaattttgtgtttttttccctgcctctagaattaagc

SEQ ID NO: 2988 - DNA, 17 bp, synthetic construct
  source 1..17: mol_type = other DNA
tctctgaggtcaggaac

SEQ ID NO: 2989 - DNA, 50 bp, synthetic construct
  source 1..50: mol_type = other DNA
ggcctgggcacagtggcttatgcctgtaatactaacactttgagaggcca

SEQ ID NO: 2990 - DNA, 50 bp, synthetic construct
  source 1..50: mol_type = other DNA
aggtaggaagatcacctgagctcaggagttcaaaaccagcctacgcaata

SEQ ID NO: 2991 - DNA, 50 bp, synthetic construct
  source 1..50: mol_type = other DNA
tagtgagacctcatctctataaaaaaattttaaaagttagtcaagtgtgg

SEQ ID NO: 2992 - DNA, 34 bp, synthetic construct
  source 1..34: mol_type = other DNA
tggcacacacctatagtcctggctactcaggagg

SEQ ID NO: 2993 - DNA, 50 bp, synthetic construct
  source 1..50: mol_type = other DNA
ggccgggtgtgatggctcacacctgtaatcccagcactttgggaggctga

SEQ ID NO: 2994 - DNA, 50 bp, synthetic construct
  source 1..50: mol_type = other DNA
ggcagacagatcacctgaggtcaggagttcaagaccagcctggccaacat

SEQ ID NO: 2995 - DNA, 50 bp, synthetic construct
  source 1..50: mol_type = other DNA
ggcaaaaccctgtctctactaaaaatacaaaaattagctgggcatggtgg

SEQ ID NO: 2996 - DNA, 50 bp, synthetic construct
  source 1..50: mol_type = other DNA
cacatgcctgtaatcccagctactcaggaggctgaggcaggagaatcgct

SEQ ID NO: 2997 - DNA, 50 bp, synthetic construct
  source 1..50: mol_type = other DNA
tgaacccgggaggcagaggttgtggtgagctgagatggtgccattgcact

SEQ ID NO: 2998 - DNA, 50 bp, synthetic construct
  source 1..50: mol_type = other DNA
ccagcctgggcaacaagagtgaaactctgtctcaaaaaaaaaaaaaaaga

SEQ ID NO: 2999 - skipped

SEQ ID NO: 3000 - DNA, 50 bp, synthetic construct
  source 1..50: mol_type = other DNA
gtttacttttctaatctttagtgcctagcatattgtctggcgtagagtgg

SEQ ID NO: 3001 - DNA, 35 bp, synthetic construct
  source 1..35: mol_type = other DNA
ggacttcataaatgcatatttttgaatgaataagt

SEQ ID NO: 3002 - DNA, 50 bp, synthetic construct
  source 1..50: mol_type = other DNA
ccttcctttccctgctgtcttcttctgacactgcctgatgtttcattgaa

SEQ ID NO: 3003 - DNA, 50 bp, synthetic construct
  source 1..50: mol_type = other DNA
aagtagaggtcattaaacaggaattctctcatcttcccaccaccagtctt

SEQ ID NO: 3004 - DNA, 25 bp, synthetic construct
  source 1..25: mol_type = other DNA
cctaacccacctcctactatgacta

SEQ ID NO: 3005 - DNA, 50 bp, synthetic construct
  source 1..50: mol_type = other DNA
gtcatttcacctctttggcgcttagttttctttttgtgaagtaacgctac

SEQ ID NO: 3006 - DNA, 49 bp, synthetic construct
  source 1..49: mol_type = other DNA
aggatgagcttctgagagtctgagaagcccctgaaattttagaattcta

SEQ ID NO: 3007 - DNA, 50 bp, synthetic construct
  source 1..50: mol_type = other DNA
tgtgttcatttctttgggaaggccttagcagattctgaaggagtccgtaa

SEQ ID NO: 3008 - DNA, 20 bp, synthetic construct
  source 1..20: mol_type = other DNA
ctctcaaaggattaagaacc

SEQ ID NO: 3009 - DNA, 50 bp, synthetic construct
  source 1..50: mol_type = other DNA
cagcttagtgcctggaacagagagttgctcaataaatatttgttgaatga

SEQ ID NO: 3010 - DNA, 10 bp, synthetic construct
  source 1..10: mol_type = other DNA
ataaagtaca

SEQ ID NO: 3011 - DNA, 50 bp, synthetic construct
  source 1..50: mol_type = other DNA
tagtgcctggcacagggaagatgcttggtgcatgtttgttgaatgaatga

SEQ ID NO: 3012 - DNA, 50 bp, synthetic construct
  source 1..50: mol_type = other DNA
cagtgccaaggctgtgcctggcacacatgggggtgcaatagatgtttgtt

SEQ ID NO: 3013 - DNA, 10 bp, synthetic construct
  source 1..10: mol_type = other DNA
gaatgaatga

SEQ ID NO: 3014 - DNA, 50 bp, synthetic construct
  source 1..50: mol_type = other DNA
agtgcctggcacagagaaagtgctcagtaaatatttgttgaatgaatgaa

SEQ ID NO: 3015 - DNA, 50 bp, synthetic construct
  source 1..50: mol_type = other DNA
cattcccagtgcccagcacagtgcctggcacataataggtgctcagtaag

SEQ ID NO: 3016 - DNA, 50 bp, synthetic construct
  source 1..50: mol_type = other DNA
agtgcctggcacagagtaggtgctcattaagtgtttgttgaatgaatgac

SEQ ID NO: 3017 - DNA, 50 bp, synthetic construct
  source 1..50: mol_type = other DNA
cccagtgcccagcatagtgcctggcacatagcagggcttaatctcgtggt

SEQ ID NO: 3018 - DNA, 50 bp, synthetic construct
  source 1..50: mol_type = other DNA
tccttagaaaatatttgttgaatgaacaaaggaaggaaatgagtcaaaat

SEQ ID NO: 3019 - DNA, 50 bp, synthetic construct
  source 1..50: mol_type = other DNA
tagtgcctggcacaagtttgcactaaataaatatttgttgaatgaatgct

SEQ ID NO: 3020 - DNA, 50 bp, synthetic construct
  source 1..50: mol_type = other DNA
attcccagtgccaagaatggtgcctggcacagagtaggtgcttaatatgt

SEQ ID NO: 3021 - DNA, 50 bp, synthetic construct
  source 1..50: mol_type = other DNA
gcccagcttagtgcctggcacaaattaagtagtcaataaatataaaaata

SEQ ID NO: 3022 - DNA, 50 bp, synthetic construct
  source 1..50: mol_type = other DNA
ccagcttagtgcctggcacagtatgtatctttgtaactaacaagaggcaa

SEQ ID NO: 3023 - DNA, 50 bp, synthetic construct
  source 1..50: mol_type = other DNA
cccagtgcctaaaacagtgcctggcacagggcagttgctcagtgaatgtg

SEQ ID NO: 3024 - DNA, 50 bp, synthetic construct
  source 1..50: mol_type = other DNA
actattttattacattcccatcagcactgcacaagaattccaatatctcc

SEQ ID NO: 3025 - DNA, 50 bp, synthetic construct
  source 1..50: mol_type = other DNA
aaatatgtttgttgaatgaacagcaaaactaggaactaacatttattcag

SEQ ID NO: 3026 - DNA, 50 bp, synthetic construct
  source 1..50: mol_type = other DNA
cccagtgcccagaactgtgcctggcacataacaggtgcttaatcaatgca

SEQ ID NO: 3027 - DNA, 50 bp, synthetic construct; identical to SEQ ID NO: 2860
  source 1..50: mol_type = other DNA

SEQ ID NO: 3028 - DNA, 50 bp, synthetic construct; identical to SEQ ID NO: 2861
  source 1..50: mol_type = other DNA

SEQ ID NO: 3029 - DNA, 50 bp, synthetic construct; identical to SEQ ID NO: 2862
  source 1..50: mol_type = other DNA

SEQ ID NO: 3030 - DNA, 50 bp, synthetic construct; identical to SEQ ID NO: 2863
  source 1..50: mol_type = other DNA

SEQ ID NO: 3031 - DNA, 50 bp, synthetic construct; identical to SEQ ID NO: 2864
  source 1..50: mol_type = other DNA

SEQ ID NO: 3032 - DNA, 50 bp, synthetic construct; identical to SEQ ID NO: 2865
  source 1..50: mol_type = other DNA

SEQ ID NO: 3033 - DNA, 50 bp, synthetic construct; identical to SEQ ID NO: 2866
  source 1..50: mol_type = other DNA

SEQ ID NO: 3034 - DNA, 50 bp, synthetic construct
  source 1..50: mol_type = other DNA
tatgtggggcaggagcttctttgtttgaatttgctcctgagaggatgagg

SEQ ID NO: 3035 - DNA, 50 bp, synthetic construct; identical to SEQ ID NO: 2868
  source 1..50: mol_type = other DNA

SEQ ID NO: 3036 - DNA, 50 bp, synthetic construct; identical to SEQ ID NO: 2869
  source 1..50: mol_type = other DNA

SEQ ID NO: 3037 - DNA, 50 bp, synthetic construct
  source 1..50: mol_type = other DNA
ccgcagggtccccacagcggctcccgacggttgtgaaccagcatccatcc

SEQ ID NO: 3038 - DNA, 50 bp, synthetic construct
  source 1..50: mol_type = other DNA
tgccaggcactggcatgggcactggggctgccacgtaaaatgagcacaca

SEQ ID NO: 3039 - DNA, 50 bp, synthetic construct
  source 1..50: mol_type = other DNA
taatcatttcttccacttggggtttatgtactagttggagaggcagttca

SEQ ID NO: 3040 - DNA, 50 bp, synthetic construct
  source 1..50: mol_type = other DNA
tgaaaacttgaaccaatcaagtaataaaatagtgcttcagggaatttaca

SEQ ID NO: 3041 - DNA, 30 bp, synthetic construct
  source 1..30: mol_type = other DNA
tgtgccaggcactatgctgggcactgggca

SEQ ID NO: 3042 - DNA, 30 bp, synthetic construct
  source 1..30: mol_type = other DNA
gtggtgcagaagcttctttgtttaattaga

SEQ ID NO: 3043 - DNA, 30 bp, synthetic construct
  source 1..30: mol_type = other DNA
agagcacattcttggctcctggacagcatc

SEQ ID NO: 3044 - DNA, 30 bp, synthetic construct
  source 1..30: mol_type = other DNA
tgtgccaggcacagcgctgggcactggctc

SEQ ID NO: 3045 - DNA, 30 bp, synthetic construct
  source 1..30: mol_type = other DNA
tgtgccaggcactaagctgggctgtgggtc

SEQ ID NO: 3046 - DNA, 50 bp, synthetic construct
  source 1..50: mol_type = other DNA
cccagtgcctggaacagtgcctggcacagaggggatgctccttacatgtt

SEQ ID NO: 3047 - DNA, 13 bp, synthetic construct
  source 1..13: mol_type = other DNA
tgttgaatgaata

SEQ ID NO: 3048 - DNA, 30 bp, synthetic construct
  source 1..30: mol_type = other DNA
cagacctgtggcttttattagtttttttct

SEQ ID NO: 3049 - DNA, 23 bp, synthetic construct
  source 1..23: mol_type = other DNA
tcctgaagttatttttccttgta

SEQ ID NO: 3050 - DNA, 50 bp, synthetic construct
  source 1..50: mol_type = other DNA
tttaaaagttcaatggcttctaacttttgccctctgttctggttttgtat

SEQ ID NO: 3051 - DNA, 10 bp, synthetic construct
  source 1..10: mol_type = other DNA
cacatagtaa

SEQ ID NO: 3052 - DNA, 30 bp, synthetic construct
  source 1..30: mol_type = other DNA
gtgctcagtaaataacagtgatcttatctg

SEQ ID NO: 3053 - DNA, 50 bp, synthetic construct; identical to SEQ ID NO: 2882
  source 1..50: mol_type = other DNA

SEQ ID NO: 3054 - DNA, 50 bp, synthetic construct; identical to SEQ ID NO: 2883
  source 1..50: mol_type = other DNA

SEQ ID NO: 3055 - DNA, 50 bp, synthetic construct; identical to SEQ ID NO: 2884
  source 1..50: mol_type = other DNA

SEQ ID NO: 3056 - DNA, 50 bp, synthetic construct; identical to SEQ ID NO: 2885
  source 1..50: mol_type = other DNA

SEQ ID NO: 3057 - DNA, 50 bp, synthetic construct; identical to SEQ ID NO: 2886
  source 1..50: mol_type = other DNA

SEQ ID NO: 3058 - DNA, 50 bp, synthetic construct; identical to SEQ ID NO: 2887
  source 1..50: mol_type = other DNA

SEQ ID NO: 3059 - DNA, 50 bp, synthetic construct; identical to SEQ ID NO: 2888
  source 1..50: mol_type = other DNA

SEQ ID NO: 3060 - DNA, 50 bp, synthetic construct; identical to SEQ ID NO: 2889
  source 1..50: mol_type = other DNA

SEQ ID NO: 3061 - DNA, 25 bp, synthetic construct
  source 1..25: mol_type = other DNA
aaataacagtgattaaatgaatgaa

SEQ ID NO: 3062 - DNA, 20 bp, synthetic construct
  source 1..20: mol_type = other DNA
tgtatttcatcagtcttttt

SEQ ID NO: 3063 - DNA, 25 bp, synthetic construct
  source 1..25: mol_type = other DNA
gcctttgcattcactgtttattttg

SEQ ID NO: 3064 - DNA, 13 bp, synthetic construct
  source 1..13: mol_type = other DNA
cttggaatgctct

SEQ ID NO: 3065 - DNA, 50 bp, synthetic construct
  source 1..50: mol_type = other DNA
acagtgcctgactcacagtaggtgctcagtaaaaagtgttaaatgaatga

SEQ ID NO: 3066 - skipped

SEQ ID NO: 3067 - DNA, 50 bp, synthetic construct
  source 1..50: mol_type = other DNA
ctgtttcttttgcttggaaccccttttccttagatcctggaatggcttct

SEQ ID NO: 3068 - DNA, 50 bp, synthetic construct
  source 1..50: mol_type = other DNA
tatcagaaacgcttccctgactccccacctcaatcattttccagctcgtt

SEQ ID NO: 3069 - DNA, 20 bp, synthetic construct
  source 1..20: mol_type = other DNA
actctttttttttttctcat

SEQ ID NO: 3070 - DNA, 50 bp, synthetic construct
  source 1..50: mol_type = other DNA
tgctactggcaactagtgggtagaagtcagggatggtgccacacatcctg

SEQ ID NO: 3071 - DNA, 50 bp, synthetic construct
  source 1..50: mol_type = other DNA
tcatgcacaatgggacagccccacaacaaagaattatctggcccaaaatg

SEQ ID NO: 3072 - DNA, 30 bp, synthetic construct
  source 1..30: mol_type = other DNA
tcaatggtgccaaggttaagaaaccctgat

SEQ ID NO: 3073 - DNA, 50 bp, synthetic construct
  source 1..50: mol_type = other DNA
tcacaactgggagtgaggagggggtgctactggcatctagtgggtagaaa

SEQ ID NO: 3074 - DNA, 50 bp, synthetic construct
  source 1..50: mol_type = other DNA
ctgtagatggtgttaaacatcctccaacgacaggacagcccccacaacaa

SEQ ID NO: 3075 - DNA, 20 bp, synthetic construct
  source 1..20: mol_type = other DNA
agaattatctggccccaaat

SEQ ID NO: 3076 - DNA, 30 bp, synthetic construct
  source 1..30: mol_type = other DNA
aatcccctttgctgattccttctcaccttt

SEQ ID NO: 3077 - DNA, 40 bp, synthetic construct
  source 1..40: mol_type = other DNA
ccctaaaatccatcctttgcacagcagacacagtgatcct

SEQ ID NO: 3078 - DNA, 30 bp, synthetic construct
  source 1..30: mol_type = other DNA
cagtgatcttttaaaaatgtaaatcaggtc

SEQ ID NO: 3079 - DNA, 50 bp, synthetic construct
  source 1..50: mol_type = other DNA
cttgttttttttagatggagtctcactctgttgccaggctggagtgcagt

SEQ ID NO: 3080 - DNA, 50 bp, synthetic construct
  source 1..50: mol_type = other DNA
ggtgcgatctcagctcactgcaacctctgcctctcgggttcaagcaattc

SEQ ID NO: 3081 - DNA, 50 bp, synthetic construct
  source 1..50: mol_type = other DNA
tcctgcctcagcctcccgagtagctgggactacaggcgcgtgccaccaca

SEQ ID NO: 3082 - DNA, 50 bp, synthetic construct
  source 1..50: mol_type = other DNA
ctcagctaattttttgtatttttagtagagacagggttttaccatgttgg

SEQ ID NO: 3083 - DNA, 50 bp, synthetic construct
  source 1..50: mol_type = other DNA
ccaggatggtctcgatctcttgacttcgtgatctgcctgcctcggcctcc

SEQ ID NO: 3084 - DNA, 50 bp, synthetic construct
  source 1..50: mol_type = other DNA
aaagtgctgggattacaggtgttggccactgcgcctggcaacttctttgt

SEQ ID NO: 3085 - DNA, 50 bp, synthetic construct
  source 1..50: mol_type = other DNA
tttcaatcctgtatctttcccctatttttccctgcctgttgtactggcta

SEQ ID NO: 3086 - DNA, 50 bp, synthetic construct
  source 1..50: mol_type = other DNA
ggacctagtacaaatttgaagagaagtggttacagcaggcatccttgtct

SEQ ID NO: 3087 - DNA, 50 bp, synthetic construct
  source 1..50: mol_type = other DNA
tgttcctgatggcaagaggaagttacgtatatattctccctagaattgtt

SEQ ID NO: 3088 - DNA, 50 bp, synthetic construct
  source 1..50: mol_type = other DNA
tccctcatggcagaattggttcccaaaatgaggctaatatgttcctgttt

SEQ ID NO: 3089 - DNA, 50 bp, synthetic construct
  source 1..50: mol_type = other DNA
agccacagttccttcgtaaggctttttttttttttttttttttgaaatgg

SEQ ID NO: 3090 - DNA, 50 bp, synthetic construct
  source 1..50: mol_type = other DNA
agtctcgctctgtcacccaggctggagtgcagtggcgtgatttcggctca

SEQ ID NO: 3091 - DNA, 50 bp, synthetic construct
  source 1..50: mol_type = other DNA
ctgcaacctccgccttatgggttcaagcaattctcttgtctcagcctccc

SEQ ID NO: 3092 - DNA, 50 bp, synthetic construct
  source 1..50: mol_type = other DNA
gagtagctgggattacaggtacccaccaccatgcctggctaatttttgta

SEQ ID NO: 3093 - DNA, 50 bp, synthetic construct
  source 1..50: mol_type = other DNA
tttttggtagagacggggtttccccatgttgtccaggctgctcttgaact

SEQ ID NO: 3094 - DNA, 20 bp, synthetic construct
  source 1..20: mol_type = other DNA
cctgacctcaggtgatccac

SEQ ID NO: 3095 - DNA, 50 bp, synthetic construct
  source 1..50: mol_type = other DNA
cccaggctggagtgcagtggcgtgatcttagcttactgcaacctctacct

SEQ ID NO: 3096 - DNA, 50 bp, synthetic construct
  source 1..50: mol_type = other DNA
cccaggttcaagcaattctcctgcctcagcctcccgagtagctgggatta

SEQ ID NO: 3097 - DNA, 50 bp, synthetic construct
  source 1..50: mol_type = other DNA
taggcatgtaccaccacacctgacaattttttttgtatttttagtagaga

SEQ ID NO: 3098 - DNA, 50 bp, synthetic construct
  source 1..50: mol_type = other DNA
tggggtttcaccatgttggtctgggtggtctcgaattcctgacctcaaat

SEQ ID NO: 3099 - DNA, 50 bp, synthetic construct
  source 1..50: mol_type = other DNA
gatccacctgccttggccttgcaaagtgctcggattacacatgtgagcta

SEQ ID NO: 3100 - DNA, 50 bp, synthetic construct
  source 1..50: mol_type = other DNA
ctgcgcccagctggtacttggattgattgattgattgattgattgattta

SEQ ID NO: 3101 - DNA, 50 bp, synthetic construct
  source 1..50: mol_type = other DNA
gaccaagtcttgcttttgtcccccaggctggagtgtgatggtgcgatctc

SEQ ID NO: 3102 - DNA, 50 bp, synthetic construct
  source 1..50: mol_type = other DNA
ggctcactgcaacctccgcctcccaggttcaagcgattctcctgcctcgg

SEQ ID NO: 3103 - DNA, 50 bp, synthetic construct
  source 1..50: mol_type = other DNA
ccccgagtagctgggattacaggcgcctgccaccacgcccagctaatttt

SEQ ID NO: 3104 - DNA, 50 bp, synthetic construct
  source 1..50: mol_type = other DNA
tatatttttagtagagacagggttttacccatgttggccagactggtcta

SEQ ID NO: 3105 - DNA, 50 bp, synthetic construct
  source 1..50: mol_type = other DNA
gaactcctgatcgcaggcgatccacccgccttggcctcccaaagtgctgg

SEQ ID NO: 3106 - DNA, 17 bp, synthetic construct
  source 1..17: mol_type = other DNA
gattacaggcgtgagcc

SEQ ID NO: 3107 - DNA, 50 bp, synthetic construct
  source 1..50: mol_type = other DNA
ctttttttttttttttttttttttttgagatggagcctcgctctgtcatc

SEQ ID NO: 3108 - DNA, 50 bp, synthetic construct
  source 1..50: mol_type = other DNA
caggctggagtgcaatggtgcgatctcggctcactgcaacctccgcctcc

SEQ ID NO: 3109 - DNA, 50 bp, synthetic construct
  source 1..50: mol_type = other DNA
cgggttcaagcaattctcctgtctcagcctcccgagtagctgggactaca

SEQ ID NO: 3110 - DNA, 50 bp, synthetic construct
  source 1..50: mol_type = other DNA
ggtgcgtgccaccacgcccggctaatttttgtatttttagtagagacggg

SEQ ID NO: 3111 - DNA, 50 bp, synthetic construct
  source 1..50: mol_type = other DNA
gtttcaccatattggtcaggctggtctcgaactcctgacctcaggtgatc

SEQ ID NO: 3112 - DNA, 20 bp, synthetic construct
  source 1..20: mol_type = other DNA
cacccgccttggcctcccaa

SEQ ID NO: 3113 - DNA, 50 bp, synthetic construct
  source 1..50: mol_type = other DNA
ggttcaagcaattcccctgcctcagcctcctgagtagctgggactacagg

SEQ ID NO: 3114 - DNA, 50 bp, synthetic construct
  source 1..50: mol_type = other DNA
catgtgccaccacgcccggctaattttctgtattttagtggagatggggt

SEQ ID NO: 3115 - DNA, 50 bp, synthetic construct
  source 1..50: mol_type = other DNA
ttccccatgttggccaggatggtctcgatcttctgacctcatgatctgcg

SEQ ID NO: 3116 - DNA, 50 bp, synthetic construct
  source 1..50: mol_type = other DNA
tgcctcagcctcccaaagtgctgggattacaggtatgagccaccgcacct

SEQ ID NO: 3117 - DNA, 50 bp, synthetic construct
  source 1..50: mol_type = other DNA
ggctttttttttttgagctggagtcttgctgtgtcacccaggctggagtg

SEQ ID NO: 3118 - DNA, 50 bp, synthetic construct
  source 1..50: mol_type = other DNA
ccgtgttacgatctctgctcactgcaacctccgtctcctgggttcaagtg

SEQ ID NO: 3119 - DNA, 50 bp, synthetic construct
  source 1..50: mol_type = other DNA
attctccctgcctcagcctcccaagtagctgagattacaggcgaccacca

SEQ ID NO: 3120 - DNA, 50 bp, synthetic construct
  source 1..50: mol_type = other DNA
ccacgcctggctagtttttatatttttggtagagacagggtttcaccatg

SEQ ID NO: 3121 - DNA, 50 bp, synthetic construct
  source 1..50: mol_type = other DNA
ttggccaggctggtcttgaacttctgatctcaggtgatctgcccaccttg

SEQ ID NO: 3122 - DNA, 50 bp, synthetic construct
  source 1..50: mol_type = other DNA
gcctctcaaagtgctgggattacaggcgtgagccactgcgcccagctaat

SEQ ID NO: 3123 - DNA, 50 bp, synthetic construct
  source 1..50: mol_type = other DNA
gccaggcgcagtggctcacgcctgtaatcccagcactttgggaggccaag

SEQ ID NO: 3124 - DNA, 50 bp, synthetic construct
  source 1..50: mol_type = other DNA
gcgggtggatcacaaggtcaggagatcgagaccatcctggctaacatggt

SEQ ID NO: 3125 - DNA, 50 bp, synthetic construct
  source 1..50: mol_type = other DNA
gaaaccccgtctctactaaaaatacaaaaatttagccgggtgtagtggcg

SEQ ID NO: 3126 - DNA, 50 bp, synthetic construct
  source 1..50: mol_type = other DNA
ggcacctgtagtcccagctactcgggaggctgaggcaggcgaatggcgtg

SEQ ID NO: 3127 - DNA, 50 bp, synthetic construct
  source 1..50: mol_type = other DNA
aacccggaaggcagagcttgcagtgagctgagatcgcaccactgcactcc

SEQ ID NO: 3128 - DNA, 47 bp, synthetic construct
  source 1..47: mol_type = other DNA
agcctgggcgacagagtgagactccatctcagaaaaaaacaaaacaa

SEQ ID NO: 3129 - DNA, 50 bp, synthetic construct
  source 1..50: mol_type = other DNA
gtggctcacaactgattgtaatcccagcactttgggaggccgaggcaggt

SEQ ID NO: 3130 - DNA, 50 bp, synthetic construct
  source 1..50: mol_type = other DNA
ggatcacctgaggtcaggagttcaagaccagcctggccaacatggtgaag

SEQ ID NO: 3131 - DNA, 50 bp, synthetic construct
  source 1..50: mol_type = other DNA
ccccgtctctactaaaaataccaaaaaatagccaggcatggtggagggca

SEQ ID NO: 3132 - DNA, 50 bp, synthetic construct
  source 1..50: mol_type = other DNA
cctgtaatcccagctactcaggaggctgaggcaggagaatcacttgaacc

SEQ ID NO: 3133 - DNA, 50 bp, synthetic construct
  source 1..50: mol_type = other DNA
cgggaggtggagtttgcagtgggccgagatcgcaccattgcactccaacc

SEQ ID NO: 3134 - DNA, 40 bp, synthetic construct
  source 1..40: mol_type = other DNA
tgggcgacaagagtgagactccatctcagaaaaaaaaaaa

SEQ ID NO: 3135 - DNA, 50 bp, synthetic construct
  source 1..50: mol_type = other DNA
ggcgcagtgtttcacacctgtaatcccagcactttgggaggccaaggtgg

SEQ ID NO: 3136 - DNA, 50 bp, synthetic construct
  source 1..50: mol_type = other DNA
gcagatcacgaggtcaggagttcaaggccatcctggccaacatggtgaaa

SEQ ID NO: 3137 - DNA, 50 bp, synthetic construct
  source 1..50: mol_type = other DNA
cccctgtctctactaaaaatacaaaaattagctgggcgtggtggcaggcg

SEQ ID NO: 3138 - DNA, 50 bp, synthetic construct
  source 1..50: mol_type = other DNA
cctataatcccagctactcgggaggctgagacaggagaattgcttgaacc

SEQ ID NO: 3139 - DNA, 50 bp, synthetic construct
  source 1..50: mol_type = other DNA
caggaggcagaggctgcagtgagccaagattgtgccactgcactctagcc

SEQ ID NO: 3140 - DNA, 50 bp, synthetic construct
  source 1..50: mol_type = other DNA
tgggtgacagagtgaggctcagtctcaaaaaaaaaaaaaaaaagaaaaga

SEQ ID NO: 3141 - DNA, 50 bp, synthetic construct
  source 1..50: mol_type = other DNA
gaccaggcgcagtggctcatgcctataatcccagcactttgggaggccaa

SEQ ID NO: 3142 - DNA, 50 bp, synthetic construct
  source 1..50: mol_type = other DNA
ggtgggtggatcacctgaggtcaggagttcgagaccagtctggccaatat

SEQ ID NO: 3143 - DNA, 50 bp, synthetic construct
  source 1..50: mol_type = other DNA
ggcgaaacgctgtctctactaaaaatacaaaaaatagacaggtgtggtgg

SEQ ID NO: 3144 - DNA, 50 bp, synthetic construct
  source 1..50: mol_type = other DNA
tgcacgcctgtagtcccagctacttgggaggctgaggctggagaatcgct

SEQ ID NO: 3145 - DNA, 50 bp, synthetic construct
  source 1..50: mol_type = other DNA
tgaacccaggaggtggaggttgcagtgagctgagatggcgccactgcact

SEQ ID NO: 3146 - DNA, 50 bp, synthetic construct
  source 1..50: mol_type = other DNA
ccagcctgggcaacagagtaagactctatctcaaaacaaaacaaaacaaa

SEQ ID NO: 3147 - DNA, 50 bp, synthetic construct
  source 1..50: mol_type = other DNA
aaaccatgatgatatatcactattcacctgttagaatagctaaaaattca

SEQ ID NO: 3148 - DNA, 50 bp, synthetic construct
  source 1..50: mol_type = other DNA
ggcagggacaaaataaaatgctgctgaggatgcagagaaactgaatgtct

SEQ ID NO: 3149 - DNA, 46 bp, synthetic construct
  source 1..46: mol_type = other DNA
tgtacattgatggtgggacagtaaaaaaaaaaaaaaagaaaagaaa

SEQ ID NO: 3150 - DNA, 50 bp, synthetic construct
  source 1..50: mol_type = other DNA
ggccaggcgcagtggctcatgcctgtaatcccagcactttgggaggccga

SEQ ID NO: 3151 - DNA, 50 bp, synthetic construct
  source 1..50: mol_type = other DNA
ggtgggcagatcacctgagatcagaagttcaagaccagcctggccaacaa

SEQ ID NO: 3152 - DNA, 50 bp, synthetic construct
  source 1..50: mol_type = other DNA
tggtgaaaccctgtctctactaaaaatacaaaaattagccaggcgcggtg

SEQ ID NO: 3153 - DNA, 50 bp, synthetic construct
  source 1..50: mol_type = other DNA
gcaggcacctgtaatcccagctactcgggaggctgaggcaggagaattgc

SEQ ID NO: 3154 - DNA, 50 bp, synthetic construct
  source 1..50: mol_type = other DNA
ttgagcctgggaggcagaggtttcagtgagtggagattgcaccagtgcac

SEQ ID NO: 3155 - DNA, 29 bp, synthetic construct
  source 1..29: mol_type = other DNA
tccagcctgggtgacagagtgagactaca

SEQ ID NO: 3156 - DNA, 50 bp, synthetic construct
  source 1..50: mol_type = other DNA
ggccaggcacggtggctcacgcctgtaatcccagcacattgggaggccaa

SEQ ID NO: 3157 - DNA, 50 bp, synthetic construct
  source 1..50: mol_type = other DNA
ggtgggcagattacctgaggtcaggagttcgagaccagcctggccaacat

SEQ ID NO: 3158 - DNA, 50 bp, synthetic construct
  source 1..50: mol_type = other DNA
ggagaaaccctgtctctactaaaaatacaaaaattagctggatgtggcag

SEQ ID NO: 3159 - DNA, 50 bp, synthetic construct
  source 1..50: mol_type = other DNA
tgggaacctgtaatcccagctacttgggaagctgaggcaggagaatccct

SEQ ID NO: 3160 - DNA, 50 bp, synthetic construct
  source 1..50: mol_type = other DNA
tgaacccaggaggcggaggttacagtgagctgagatcgcgccagtgcact

SEQ ID NO: 3161 - DNA, 23 bp, synthetic construct
  source 1..23: mol_type = other DNA
ccagcctaggtgacagagtgaga

SEQ ID NO: 3162 - DNA, 35 bp, synthetic construct
  source 1..35: mol_type = other DNA
ttcacattctcttccccgtccattccagctggaac

SEQ ID NO: 3163 - DNA, 25 bp, synthetic construct
  source 1..25: mol_type = other DNA
cttcatgttccattttcagataaat

SEQ ID NO: 3164 - DNA, 25 bp, synthetic construct
  source 1..25: mol_type = other DNA
ctttccttgctatcttcttctatct

SEQ ID NO: 3165 - DNA, 27 bp, synthetic construct
  source 1..27: mol_type = other DNA
cattctctcctcagcccactccaatca

SEQ ID NO: 3166 - DNA, 36 bp, synthetic construct
  source 1..36: mol_type = other DNA
tctcatacttttcacataccctcctcagcccagtct

SEQ ID NO: 3167 - DNA, 23 bp, synthetic construct
  source 1..23: mol_type = other DNA
cttcatgttccattttcagataa

SEQ ID NO: 3168 - DNA, 30 bp, synthetic construct
  source 1..30: mol_type = other DNA
tttcactcatacatgtttaaaaataaattc

SEQ ID NO: 3169 - DNA, 28 bp, synthetic construct
  source 1..28: mol_type = other DNA
agtcatttgacttctctcttcctcagtt

SEQ ID NO: 3170 - DNA, 28 bp, synthetic construct
  source 1..28: mol_type = other DNA
tctggtcacatcaccccctgcttaggac

SEQ ID NO: 3171 - DNA, 20 bp, synthetic construct
  source 1..20: mol_type = other DNA
tgttgctacttcctcctaag

SEQ ID NO: 3172 - DNA, 40 bp, synthetic construct
  source 1..40: mol_type = other DNA
agagcttcagtttcctcttctgtaaaatggggattctatg

SEQ ID NO: 3173 - DNA, 34 bp, synthetic construct
  source 1..34: mol_type = other DNA
cttagtttcctcttctgtaaaatggggatgataa

SEQ ID NO: 3174 - DNA, 33 bp, synthetic construct
  source 1..33: mol_type = other DNA
gttcctcttctgtaaaatggggataatattcct

SEQ ID NO: 3175 - DNA, 32 bp, synthetic construct
  source 1..32: mol_type = other DNA
ttcctcttctgtaaaatgggtataatgctgat

SEQ ID NO: 3176 - DNA, 36 bp, synthetic construct
  source 1..36: mol_type = other DNA
cttaggttcctcatctgtaaaatggggagaatactt

SEQ ID NO: 3177 - DNA, 50 bp, synthetic construct
  source 1..50: mol_type = other DNA
ggctgagtgtggtggctcatgcctctaatcccagcactttgggaggccaa

SEQ ID NO: 3178 - DNA, 50 bp, synthetic construct
  source 1..50: mol_type = other DNA
ggtgggaggattgcttgagcccaggagttagagaccagactgggcaacat

SEQ ID NO: 3179 - DNA, 50 bp, synthetic construct
  source 1..50: mol_type = other DNA
agtgagacccctgtctctgcaaaaaacttaaaaaataagatgggcatggt

SEQ ID NO: 3180 - DNA, 50 bp, synthetic construct
  source 1..50: mol_type = other DNA
gacgtacacctgtagttccagctactcgggaggctaaggtgggaggattg

SEQ ID NO: 3181 - DNA, 50 bp, synthetic construct
  source 1..50: mol_type = other DNA
cttgagcccaggagatggaggctgcgttgagctgtgatcacaccactgca

SEQ ID NO: 3182 - DNA, 20 bp, synthetic construct
  source 1..20: mol_type = other DNA
ctgcagcctgagcgacagaa

SEQ ID NO: 3183 - DNA, 50 bp, synthetic construct
  source 1..50: mol_type = other DNA
gtggtgactcacgcctctaatcccagcacttagggaggccggggtcgagg

SEQ ID NO: 3184 - DNA, 50 bp, synthetic construct
  source 1..50: mol_type = other DNA
attgcttgagcccaggagtttgagagcagcttgagcaacatagtgagacc

SEQ ID NO: 3185 - skipped

SEQ ID NO: 3186 - DNA, 50 bp, synthetic construct
  source 1..50: mol_type = other DNA
taatcccagcactttgggaggctgaagtggaaggatcgcttgagcccagg

SEQ ID NO: 3187 - DNA, 50 bp, synthetic construct
  source 1..50: mol_type = other DNA
agtttgagagcagcctgggcaacatagtgagaccctgtctctatctttga

SEQ ID NO: 3188 - DNA, 50 bp, synthetic construct
  source 1..50: mol_type = other DNA
aaaaaataacgaaaggttaaaaaaaaaaagcactcagtaaatccaggagg

SEQ ID NO: 3189 - DNA, 50 bp, synthetic construct
  source 1..50: mol_type = other DNA
agagaaggatggagatataatacagggagaggaaggaacaggatagcaaa

SEQ ID NO: 3190 - DNA, 50 bp, synthetic construct
  source 1..50: mol_type = other DNA
ataaatgctgtctgttcattctgtttacaaatgctggcaatgacctaacc

SEQ ID NO: 3191 - DNA, 36 bp, synthetic construct
  source 1..36: mol_type = other DNA
cagtgtttcaaattctctattagaaggagaaaaaat

SEQ ID NO: 3192 - DNA, 40 bp, synthetic construct
  source 1..40: mol_type = other DNA
ttttttctattgcctctagaatataagctctctgaggtta

SEQ ID NO: 3193 - DNA, 41 bp, synthetic construct
  source 1..41: mol_type = other DNA
ttaaatgccctcttctcagagaggccttccttgaacactgt

SEQ ID NO: 3194 - DNA, 34 bp, synthetic construct
  source 1..34: mol_type = other DNA
atttctctttatttcacttaccattttatttcag

SEQ ID NO: 3195 - DNA, 21 bp, synthetic construct
  source 1..21: mol_type = other DNA
tttccctgcctctagaattag

SEQ ID NO: 3196 - DNA, 50 bp, synthetic construct
  source 1..50: mol_type = other DNA
ctgggcacaatggcgcatgcctgtaatcccagcactttgggaggccaagg

SEQ ID NO: 3197 - DNA, 50 bp, synthetic construct
  source 1..50: mol_type = other DNA
caggaggatcacttgagctcaggagttcaaaaccagcctgggcaacatag

SEQ ID NO: 3198 - DNA, 25 bp, synthetic construct
  source 1..25: mol_type = other DNA
tgagacccaatctctataaaaaata

SEQ ID NO: 3199 - DNA, 50 bp, synthetic construct
  source 1..50: mol_type = other DNA
acagtggcttatgcctgtaatcccagtaccttgaaaggccaaggcaggag

SEQ ID NO: 3200 - DNA, 50 bp, synthetic construct
  source 1..50: mol_type = other DNA
gattgtttgacctcaggagttcgagaacagcctgagcaacatagtgagac

SEQ ID NO: 3201 - DNA, 50 bp, synthetic construct
  source 1..50: mol_type = other DNA
ctcgtctctactaaaaataaaaatttttaaaaaagttagccaggtggagt

SEQ ID NO: 3202 - DNA, 20 bp, synthetic construct
  source 1..20: mol_type = other DNA
ggcacacacctgtagtctag

SEQ ID NO: 3203 - DNA, 50 bp, synthetic construct
  source 1..50: mol_type = other DNA
ggccgggtgcggtggctcacacctgtaatcccagcactttgggaggctga

SEQ ID NO: 3204 - DNA, 50 bp, synthetic construct
  source 1..50: mol_type = other DNA
ggtgggaggatcacctgaggtcgggagtttaagaccagcctgaccaacat

SEQ ID NO: 3205 - DNA, 50 bp, synthetic construct
  source 1..50: mol_type = other DNA
ggagaaacactgtctctactaaaaatttaaaattagccaggcgtggtggc

SEQ ID NO: 3206 - DNA, 50 bp, synthetic construct
  source 1..50: mol_type = other DNA
acatgcctgtaatcccagctactcgggagcctgaggcaggagaattgctt

SEQ ID NO: 3207 - DNA, 50 bp, synthetic construct
  source 1..50: mol_type = other DNA
gaaccctggaggcggaggttgtggtgagctgagatggcgccattgcactc

SEQ ID NO: 3208 - DNA, 50 bp, synthetic construct
  source 1..50: mol_type = other DNA
cagcctgggcaacaagagtgaaactctgtctcaaaaaaaaaaaaaaaaaa

SEQ ID NO: 3209 - DNA, 10 bp, synthetic construct
  source 1..10: mol_type = other DNA
aaaaaaattc

SEQ ID NO: 3210 - DNA, 50 bp, synthetic construct
  source 1..50: mol_type = other DNA
ggctgggtgtgatggctcacacctgtaatcccagcacttccggaggctga

SEQ ID NO: 3211 - DNA, 50 bp, synthetic construct
  source 1..50: mol_type = other DNA
ggtgggcagatcacttgaggtcaggaattcgagaccagcctgatcaacat

SEQ ID NO: 3212 - DNA, 50 bp, synthetic construct
  source 1..50: mol_type = other DNA
ggtgaaaccctgcctctactaaaaatacaaaaattacctgggcgtggtgg

SEQ ID NO: 3213 - DNA, 50 bp, synthetic construct
  source 1..50: mol_type = other DNA
cacatgcctgtaatcccagctactcgggaggctgaggcaggaggatcgct

SEQ ID NO: 3214 - DNA, 50 bp, synthetic construct
  source 1..50: mol_type = other DNA
tgaacctgggaggcagaggttgcagtgagctgagatggtgccattgcact

SEQ ID NO: 3215 - DNA, 50 bp, synthetic construct
  source 1..50: mol_type = other DNA
ccagcctgggtgacgagagtgaaactccatctcaaaaaaataaaaaaatt

SEQ ID NO: 3216 - DNA, 10 bp, synthetic construct
  source 1..10: mol_type = other DNA
aaaagaggta

SEQ ID NO: 3217 - DNA, 50 bp, synthetic construct
  source 1..50: mol_type = other DNA
tggctcatgcctgtaatcccagcactttgggaggcggaggcgggcaaatc

SEQ ID NO: 3218 - DNA, 50 bp, synthetic construct
  source 1..50: mol_type = other DNA
acctgagatcgggagttcaagaccagcgtgaccaacatggagaaatcctg

SEQ ID NO: 3219 - DNA, 50 bp, synthetic construct
  source 1..50: mol_type = other DNA
tctctactaaaaatataaaattagccgggcgtggtggcaaatgcctgtaa

SEQ ID NO: 3220 - DNA, 50 bp, synthetic construct
  source 1..50: mol_type = other DNA
tctcagctactcaggaggctgaggcaggagaattgcttgaacccaggagg

SEQ ID NO: 3221 - DNA, 50 bp, synthetic construct
  source 1..50: mol_type = other DNA
cagaggttgtggtgagccaagatggtgccattgcactccagcctgggcaa

SEQ ID NO: 3222 - DNA, 50 bp, synthetic construct
  source 1..50: mol_type = other DNA
caagagtgaaactcttgtctcaaaaaaaaaaaaaaaaaaaaaaaaagatg

SEQ ID NO: 3223 - DNA, 50 bp, synthetic construct
  source 1..50: mol_type = other DNA
aaagaaagaaagagaaagacacagagacaaaaaaagaagagaaagaaaaa

SEQ ID NO: 3224 - DNA, 50 bp, synthetic construct
  source 1..50: mol_type = other DNA
agtgcctagcatattgtctaatgtgtagtaggtgctgaataaatactttt

SEQ ID NO: 3225 - DNA, 15 bp, synthetic construct
  source 1..15: mol_type = other DNA
gaatgaataaatgtt

SEQ ID NO: 3226 - DNA, 50 bp, synthetic construct
  source 1..50: mol_type = other DNA
aaatgcatatttttgaatgaaattttagcttactaaatattttacattaa

SEQ ID NO: 3227 - DNA, 32 bp, synthetic construct
  source 1..32: mol_type = other DNA
ttttcctaagacctgcattgtttaagttgata

SEQ ID NO: 3228 - DNA, 28 bp, synthetic construct
  source 1..28: mol_type = other DNA
cttttctagtgcctagcatattgtcaag

SEQ ID NO: 3229 - DNA, 30 bp, synthetic construct
  source 1..30: mol_type = other DNA
acttcatataaatgcatattttttgaattt

SEQ ID NO: 3230 - DNA, 20 bp, synthetic construct
  source 1..20: mol_type = other DNA
agtagaggtcattaaacagc

SEQ ID NO: 3231 - DNA, 20 bp, synthetic construct
  source 1..20: mol_type = other DNA
ggaactctctcactcatctt

SEQ ID NO: 3232 - DNA, 18 bp, synthetic construct
  source 1..18: mol_type = other DNA
cccaccaccaatctctaa

SEQ ID NO: 3233 - DNA, 30 bp, synthetic construct
  source 1..30: mol_type = other DNA
tcctttctgctgtcttctgacactgcctgg

SEQ ID NO: 3234 - DNA, 50 bp, synthetic construct
  source 1..50: mol_type = other DNA
ccttcctccctgactccaggcctccgctgaggctttccttgggaaggaac

SEQ ID NO: 3235 - DNA, 50 bp, synthetic construct
  source 1..50: mol_type = other DNA
atatttaaaattgtacctgtcccccggcacactccgatcccctcattccc

SEQ ID NO: 3236 - DNA, 20 bp, synthetic construct
  source 1..20: mol_type = other DNA
tgctgtcttcttcgtgaccc

SEQ ID NO: 3237 - DNA, 29 bp, synthetic construct
  source 1..29: mol_type = other DNA
ctttccttaatccctgctgtcttcttcat

SEQ ID NO: 3238 - DNA, 40 bp, synthetic construct
  source 1..40: mol_type = other DNA
gagcttctgagagtctgcctagagaaagcaagaagccctg

SEQ ID NO: 3239 - DNA, 26 bp, synthetic construct
  source 1..26: mol_type = other DNA
aagcccctgaaattttagaattattt

SEQ ID NO: 3240 - DNA, 24 bp, synthetic construct
  source 1..24: mol_type = other DNA
tgagaagcccctgaaattttgtgg

SEQ ID NO: 3241 - DNA, 30 bp, synthetic construct
  source 1..30: mol_type = other DNA
gtcatttcacctctttctgccttagtttca

SEQ ID NO: 3242 - DNA, 50 bp, synthetic construct; identical to SEQ ID NO: 3007
  source 1..50: mol_type = other DNA

SEQ ID NO: 3243 - DNA, 21 bp, synthetic construct
  source 1..21: mol_type = other DNA
ctctcaaaggattaagaacct

SEQ ID NO: 3244 - DNA, 50 bp, synthetic construct; identical to SEQ ID NO: 3046
  source 1..50: mol_type = other DNA

SEQ ID NO: 3245 - DNA, 20 bp, synthetic construct
  source 1..20: mol_type = other DNA
tgttgaatgaataaatgcgt

SEQ ID NO: 3246 - DNA, 50 bp, synthetic construct
  source 1..50: mol_type = other DNA
gaacagtgcctggcacacagtaggtgctcaatacatgcatttgttgaatg

SEQ ID NO: 3247 - DNA, 10 bp, synthetic construct
  source 1..10: mol_type = other DNA
aatgaatgaa

SEQ ID NO: 3248 - DNA, 50 bp, synthetic construct
  source 1..50: mol_type = other DNA
cagtgcctggcacagagtaggtgctcattaagtgtttgttgaatgaatga

SEQ ID NO: 3249 - DNA, 20 bp, synthetic construct
  source 1..20: mol_type = other DNA
tgttgaatgaataaatgcgt

SEQ ID NO: 3250 - DNA, 50 bp, synthetic construct
  source 1..50: mol_type = other DNA
agtgcctggcacagggaagatgcttggtgcatgtttgttgaatgaatgaa

SEQ ID NO: 3251 - DNA, 10 bp, synthetic construct
  source 1..10: mol_type = other DNA
tgaatgaatg

SEQ ID NO: 3252 - DNA, 50 bp, synthetic construct
  source 1..50: mol_type = other DNA
gtgccaggaacagtgcctggcacagtgtaggcacaccataagggtttgtt

SEQ ID NO: 3253 - DNA, 10 bp, synthetic construct
  source 1..10: mol_type = other DNA
gaatgaataa

SEQ ID NO: 3254 - DNA, 50 bp, synthetic construct
  source 1..50: mol_type = other DNA
ccagtgcctagaacagtgcctggcacacaggagatacctaacaaacattt

SEQ ID NO: 3255 - DNA, 10 bp, synthetic construct
  source 1..10: mol_type = other DNA
gttgaatgag

SEQ ID NO: 3256 - DNA, 50 bp, synthetic construct
  source 1..50: mol_type = other DNA
atcctgcagtgcctggcacagagtaggtgctcattaagtgtttgttgaat

SEQ ID NO: 3257 - skipped

SEQ ID NO: 3258 - DNA, 50 bp, synthetic construct
  source 1..50: mol_type = other DNA
cagtgcctggcacagagaaagtgctcagtaaatatttgttgaatgaatga

SEQ ID NO: 3259 - DNA, 50 bp, synthetic construct
  source 1..50: mol_type = other DNA
gcctggcacagagtaggtgctcagtaaatgtttgttgaatgaggcacagt

SEQ ID NO: 3260 - DNA, 50 bp, synthetic construct
  source 1..50: mol_type = other DNA
cagtgcctggcacagagtaggtgctcaataaatgctttttgaatgagtat

SEQ ID NO: 3261 - DNA, 50 bp, synthetic construct
  source 1..50: mol_type = other DNA
cagtgcctggcacagaggggatgctccttacatgtttgttgaatgaataa

SEQ ID NO: 3262 - DNA, 50 bp, synthetic construct
  source 1..50: mol_type = other DNA
cctggcacataataggtgctcatcaaatgtttgttgaatgaataccaggt

SEQ ID NO: 3263 - DNA, 50 bp, synthetic construct
  source 1..50: mol_type = other DNA
tggcaaagagtaggtgctcattaaatatgttgaatgaatgattaaatgag

SEQ ID NO: 3264 - DNA, 50 bp, synthetic construct
  source 1..50: mol_type = other DNA
gccaggcgcagtggctcacacctgtaatcccagcactttgagaggctgag

SEQ ID NO: 3265 - DNA, 50 bp, synthetic construct
  source 1..50: mol_type = other DNA
gcgggtggatcacttcaggccacgagtttgagaccagcctggccaacatg

SEQ ID NO: 3266 - DNA, 50 bp, synthetic construct
  source 1..50: mol_type = other DNA
gcaaaatcccatctctactaaaaatacaaaaattagccgggcatggtggt

SEQ ID NO: 3267 - DNA, 50 bp, synthetic construct
  source 1..50: mol_type = other DNA
ggttacctgtaattcagctactcaggggactgaggcaggagaatcgctag

SEQ ID NO: 3268 - DNA, 50 bp, synthetic construct
  source 1..50: mol_type = other DNA
aacccaggaggcagaggttgcagtgagccaagatcgtgccactgcatgcc

SEQ ID NO: 3269 - DNA, 37 bp, synthetic construct
  source 1..37: mol_type = other DNA
aacctgggtgacagagcaagattgtgtctcaaaaaaa

SEQ ID NO: 3270 - DNA, 50 bp, synthetic construct
  source 1..50: mol_type = other DNA
gcagtggccaggtgccgtgactcacacctgtaatcctagcactttgagag

SEQ ID NO: 3271 - DNA, 50 bp, synthetic construct
  source 1..50: mol_type = other DNA
gctgagacgggctgatcacttgaggtccggagttcaaaaccagcctggcc

SEQ ID NO: 3272 - DNA, 50 bp, synthetic construct
  source 1..50: mol_type = other DNA
gacacgatgaaaccccatctctactaaaaatacaaaaattagctaggcgt

SEQ ID NO: 3273 - DNA, 50 bp, synthetic construct
  source 1..50: mol_type = other DNA
ggtggcaggcacctgtaatcccagctactcaggggactgaggcaagagaa

SEQ ID NO: 3274 - DNA, 50 bp, synthetic construct
  source 1..50: mol_type = other DNA
tcgcttgaacccaggaggcagaggttgcagtgagccaagatcgtgccagt

SEQ ID NO: 3275 - DNA, 50 bp, synthetic construct
  source 1..50: mol_type = other DNA
gcactccatcctgggtgacagagcaagactctgtctcaaaaaataataat

SEQ ID NO: 3276 - DNA, 50 bp, synthetic construct
  source 1..50: mol_type = other DNA
gccaggcgcagtggctcatgcctgtaatcccagcactttgggaggccaag

SEQ ID NO: 3277 - DNA, 50 bp, synthetic construct
  source 1..50: mol_type = other DNA
gcgggcggatcacttgcggtcaggagttcgagatcagcctgaccaacatg

SEQ ID NO: 3278 - DNA, 50 bp, synthetic construct
  source 1..50: mol_type = other DNA
gagaaaccccatctccactaaaagtacaaaaattagctgggcgtggtggc

SEQ ID NO: 3279 - DNA, 50 bp, synthetic construct
  source 1..50: mol_type = other DNA
gcacatctgtaatcccagctactcgggaggctgaagcaggagaatcactt

SEQ ID NO: 3280 - DNA, 50 bp, synthetic construct
  source 1..50: mol_type = other DNA
gaacccaggaggcagaggttgcagtgagtcaagatcacgccactgcactc

SEQ ID NO: 3281 - DNA, 50 bp, synthetic construct
  source 1..50: mol_type = other DNA
cagcctgggcaacagagtgagactgtgtctcaaaaaaaaaaaaaaaaaag

SEQ ID NO: 3282 - DNA, 50 bp, synthetic construct
  source 1..50: mol_type = other DNA
gccaggcgcagtggctcgtgcctgtaatctcagcactttgggaggccgag

SEQ ID NO: 3283 - DNA, 50 bp, synthetic construct
  source 1..50: mol_type = other DNA
gcgagtggatcacctgaggtcaggagatcgagaccatcctggccaacatg

SEQ ID NO: 3284 - DNA, 50 bp, synthetic construct
  source 1..50: mol_type = other DNA
gtgaaccctgatctctactaaaaatacaaaaattagctgggcgtggtggc

SEQ ID NO: 3285 - DNA, 12 bp, synthetic construct
  source 1..12: mol_type = other DNA
atgcacctgtag

SEQ ID NO: 3286 - DNA, 35 bp, synthetic construct
  source 1..35: mol_type = other DNA
tctctgagcctcagtttccttgtctgcaaaaaggg

SEQ ID NO: 3287 - DNA, 50 bp, synthetic construct
  source 1..50: mol_type = other DNA
cactgcacagctgggccctggcgaccttgctttgggttctggttgggtca

SEQ ID NO: 3288 - DNA, 50 bp, synthetic construct
  source 1..50: mol_type = other DNA
tcttccatctgtgaccttggcaagaggcttcatctctctgagcctcagtt

SEQ ID NO: 3289 - DNA, 50 bp, synthetic construct
  source 1..50: mol_type = other DNA
tccttatctgcaaaagagggatgataaggcacccctgcctgccctgtggg

SEQ ID NO: 3290 - DNA, 50 bp, synthetic construct
  source 1..50: mol_type = other DNA
ctatggcgaggctcaaaaagaaaggccacggaagacactttgtaaacagg

SEQ ID NO: 3291 - DNA, 33 bp, synthetic construct
  source 1..33: mol_type = other DNA
aatgcgctacacaaaggttaaatatgattatta

SEQ ID NO: 3292 - DNA, 33 bp, synthetic construct
  source 1..33: mol_type = other DNA
tctgagcctcagtttccttgtctgcgaaaaggg

SEQ ID NO: 3293 - DNA, 35 bp, synthetic construct
  source 1..35: mol_type = other DNA
tctctgagcctcagtttcctcatctgcaaaaaggg

SEQ ID NO: 3294 - DNA, 35 bp, synthetic construct
  source 1..35: mol_type = other DNA
tctctgggcctcagtttccttgtctgcaaaatggg

SEQ ID NO: 3295 - DNA, 34 bp, synthetic construct
  source 1..34: mol_type = other DNA
tctctgagcctcagtttcttgtctgcaaaatggg

SEQ ID NO: 3296 - DNA, 35 bp, synthetic construct
  source 1..35: mol_type = other DNA
tctctgagcctcagtttccccatctgcaaaaaggg

SEQ ID NO: 3297 - DNA, 34 bp, synthetic construct
  source 1..34: mol_type = other DNA
tctctgagcctcaagtttccttgtctgtaaaggg

SEQ ID NO: 3298 - DNA, 32 bp, synthetic construct
  source 1..32: mol_type = other DNA
tctgagcctcagtttccttgtctgaaaatggg

SEQ ID NO: 3299 - DNA, 50 bp, synthetic construct
  source 1..50: mol_type = other DNA
ctctctgagcctcagttttcttatctgtgaaagagggatggtcacctgcc

SEQ ID NO: 3300 - skipped

SEQ ID NO: 3301 - DNA, 50 bp, synthetic construct
  source 1..50: mol_type = other DNA
tgtgaccttggatgagttgcttaacctctctgagcctcagttcatatgta

SEQ ID NO: 3302 - DNA, 50 bp, synthetic construct
  source 1..50: mol_type = other DNA
taatgaagctcataacagcacctgccacccaggattgtagtgagaaggat

SEQ ID NO: 3303 - DNA, 50 bp, synthetic construct
  source 1..50: mol_type = other DNA
gggagacgatgctgcaaaacacgtggcccatcaggagtcatggctcagtg

SEQ ID NO: 3304 - DNA, 50 bp, synthetic construct
  source 1..50: mol_type = other DNA
ccccatggggagtcaatgatgttggttaccattgttatcatctaccactg

SEQ ID NO: 3305 - DNA, 50 bp, synthetic construct
  source 1..50: mol_type = other DNA
cttttggaaaagcaggagggaggctgggtgcggtggctcatgcctgtact

SEQ ID NO: 3306 - DNA, 50 bp, synthetic construct
  source 1..50: mol_type = other DNA
cccagcactttgggacactgagatgggtggatcacctgaggtcaggagtt

SEQ ID NO: 3307 - DNA, 50 bp, synthetic construct
  source 1..50: mol_type = other DNA
cgagaccagcctgaccaatatggtgaaaccccatctctactacaaataca

SEQ ID NO: 3308 - DNA, 50 bp, synthetic construct
  source 1..50: mol_type = other DNA
aaaattagccgggcatggtggcatgtgcctgtaatcccagctactctcta

SEQ ID NO: 3309 - DNA, 50 bp, synthetic construct
  source 1..50: mol_type = other DNA
ctcaggaagctgaggtaggagaatcacttgaactcgggaggcagaagttt

SEQ ID NO: 3310 - DNA, 50 bp, synthetic construct
  source 1..50: mol_type = other DNA
cagtgagctgagatcatgccactgcactccagcctgggcaacagagcgag

SEQ ID NO: 3311 - DNA, 20 bp, synthetic construct
  source 1..20: mol_type = other DNA
actgtctcaaaaagaaaggg

SEQ ID NO: 3312 - DNA, 50 bp, synthetic construct
  source 1..50: mol_type = other DNA
aaagaattttactgccaggatggtagtatgatgaatgtcataaatgcact

SEQ ID NO: 3313 - DNA, 50 bp, synthetic construct
  source 1..50: mol_type = other DNA
ccccagagaaacaagcaaagctggagaaaactataaaaatgcaaccattt

SEQ ID NO: 3314 - DNA, 50 bp, synthetic construct
  source 1..50: mol_type = other DNA
aaagtctttagaaaatgtcccaaggatacagagcaaatgcagaaacattt

SEQ ID NO: 3315 - DNA, 50 bp, synthetic construct
  source 1..50: mol_type = other DNA
attcaagaaaatctactaaaactcagcataaacaatgagactgtagcact

SEQ ID NO: 3316 - DNA, 50 bp, synthetic construct
  source 1..50: mol_type = other DNA
tgaagccatgatccactgtcaccatatccccagccccaagccaaaacagc

SEQ ID NO: 3317 - DNA, 50 bp, synthetic construct
  source 1..50: mol_type = other DNA
ttagcagaagttccactctggatggatatggcccagaagatgagctccct

SEQ ID NO: 3318 - DNA, 50 bp, synthetic construct
  source 1..50: mol_type = other DNA
ctcctcctcagctcccgaacaagtgttaccatatctcatctgaagcagca

SEQ ID NO: 3319 - DNA, 50 bp, synthetic construct
  source 1..50: mol_type = other DNA
gcctaccagcatttcttatccccttcgactcaaatgtgaagtgactaaat

SEQ ID NO: 3320 - DNA, 50 bp, synthetic construct
  source 1..50: mol_type = other DNA
tctggtgagtatggctgagaggttgagggatctctcctttcactgagcac

SEQ ID NO: 3321 - DNA, 50 bp, synthetic construct
  source 1..50: mol_type = other DNA
cataggatgagaactcttctcccagacaaggaaggctgagaatactaaga

SEQ ID NO: 3322 - DNA, 50 bp, synthetic construct
  source 1..50: mol_type = other DNA
ccctgaattccttcaccccgcttgctgaaaggcagagattccatgctgtg

SEQ ID NO: 3323 - DNA, 50 bp, synthetic construct
  source 1..50: mol_type = other DNA
agaagcaaaccaagaagaccagaggctactgctccacccagcacctagaa

SEQ ID NO: 3324 - DNA, 50 bp, synthetic construct
  source 1..50: mol_type = other DNA
tagtggctcagagattctgcctatgataagaagcagtccctaagaaaaaa

SEQ ID NO: 3325 - DNA, 50 bp, synthetic construct
  source 1..50: mol_type = other DNA
gtggctcaaaagctctccccaaaggaactgactttatttaaaacagaatg

SEQ ID NO: 3326 - DNA, 50 bp, synthetic construct
  source 1..50: mol_type = other DNA
tgtggaaattcaagcctaaggatactctggaaaacaataactcctcttaa

SEQ ID NO: 3327 - DNA, 50 bp, synthetic construct
  source 1..50: mol_type = other DNA
ttaggaacaagttaaattctaggccagtagtttaccttagagaaccccag

SEQ ID NO: 3328 - DNA, 50 bp, synthetic construct
  source 1..50: mol_type = other DNA
ggaaagagacagctaagaagggtcctcttggggtcagaatacacctcaga

SEQ ID NO: 3329 - DNA, 50 bp, synthetic construct
  source 1..50: mol_type = other DNA
ggctggccttaaaaactacttctgtccagttttaattctatcagaataca

SEQ ID NO: 3330 - DNA, 50 bp, synthetic construct
  source 1..50: mol_type = other DNA
gagtaatttattccctaagctatgtcaaaaacaatagagcaattgtccag

SEQ ID NO: 3331 - DNA, 50 bp, synthetic construct
  source 1..50: mol_type = other DNA
taattagtggagcctaagggcggggtgtaaacacacaatgagccacacag

SEQ ID NO: 3332 - DNA, 50 bp, synthetic construct
  source 1..50: mol_type = other DNA
cctagaaggaagattagagaaacaggcagtttaacagagccctgctaaaa

SEQ ID NO: 3333 - DNA, 50 bp, synthetic construct
  source 1..50: mol_type = other DNA
accactgtcaccccagggtcactatatatgcccaagactgctctctctga

SEQ ID NO: 3334 - DNA, 50 bp, synthetic construct
  source 1..50: mol_type = other DNA
gaagaaacatcaaagacttcacaatttggggtaagtagacttcactaata

SEQ ID NO: 3335 - DNA, 50 bp, synthetic construct
  source 1..50: mol_type = other DNA
tagtgcagccaaatcactaaacaaagaaacaagcaaacaattccttatgg

SEQ ID NO: 3336 - DNA, 50 bp, synthetic construct
  source 1..50: mol_type = other DNA
ggagggaaagaagaatcggtatctagaattgctagaatatataacctaaa

SEQ ID NO: 3337 - DNA, 50 bp, synthetic construct
  source 1..50: mol_type = other DNA
atatccagttctcaacaaaaattatgagacatgcaaagaaataggaaaga

SEQ ID NO: 3338 - DNA, 50 bp, synthetic construct
  source 1..50: mol_type = other DNA
ctgatccacacataagaaaaagagtaggcaacagaaactaactgtgagag

SEQ ID NO: 3339 - DNA, 50 bp, synthetic construct
  source 1..50: mol_type = other DNA
gggctaaatgtcatatttaacagacaaagacttcaatgaagccattataa

SEQ ID NO: 3340 - DNA, 50 bp, synthetic construct
  source 1..50: mol_type = other DNA
atatgttcaaagaactaaaagaaaccatggttaaggaagtaaagaaaggt

SEQ ID NO: 3341 - DNA, 50 bp, synthetic construct
  source 1..50: mol_type = other DNA
atgaacaaaatgtcttatcatagagaatatcaataaaaagaaatcataaa

SEQ ID NO: 3342 - DNA, 50 bp, synthetic construct
  source 1..50: mol_type = other DNA
aaaaacccaaaagggaattctgaaattgaaaaaagtacgataaatgaaat

SEQ ID NO: 3343 - DNA, 50 bp, synthetic construct
  source 1..50: mol_type = other DNA
gtaaaaattcattacaatggctcaacagtcagtttgaactagcagaaaaa

SEQ ID NO: 3344 - DNA, 50 bp, synthetic construct
  source 1..50: mol_type = other DNA
agaatcagtgaacttgaagataaatgaaaagataatataatctgaaaagg

SEQ ID NO: 3345 - DNA, 50 bp, synthetic construct
  source 1..50: mol_type = other DNA
agagtaaaaatagaatgacgagaaataaagagtctcagagaaacctggga

SEQ ID NO: 3346 - DNA, 50 bp, synthetic construct
  source 1..50: mol_type = other DNA
cacttttgggtataccaacattggtataatggaatgaccagaaggtgagg

SEQ ID NO: 3347 - DNA, 50 bp, synthetic construct
  source 1..50: mol_type = other DNA
agaaagaaaaagaaagagaaaaaacattaaaaaaaaaatggctgcaaact

SEQ ID NO: 3348 - DNA, 50 bp, synthetic construct
  source 1..50: mol_type = other DNA
tcccacatttgatgaaaaacattaatctacacatccaaaaagctctgtga

SEQ ID NO: 3349 - DNA, 32 bp, synthetic construct
  source 1..32: mol_type = other DNA
actccaactaggataacatgcacaggtccata

SEQ ID NO: 3350 - DNA, 50 bp, synthetic construct
  source 1..50: mol_type = other DNA
atgggggctaaaaagcagtgggatggcatatttaaaatgctgaaaagaaa

SEQ ID NO: 3351 - DNA, 50 bp, synthetic construct
  source 1..50: mol_type = other DNA
actctaaagacctgtcaatcaagaatcctctatctagcaaaactttattt

SEQ ID NO: 3352 - DNA, 50 bp, synthetic construct
  source 1..50: mol_type = other DNA
caacaacaaaaacaaaataaagtcatttccagataaacaaaaactggaag

SEQ ID NO: 3353 - DNA, 50 bp, synthetic construct
  source 1..50: mol_type = other DNA
aattcatttttagcagacctaccttatcagaaatattaaagaaagttttt

SEQ ID NO: 3354 - DNA, 33 bp, synthetic construct
  source 1..33: mol_type = other DNA
aagagaaagtaaacccagatagttctctaaatc

SEQ ID NO: 3355 - DNA, 50 bp, synthetic construct
  source 1..50: mol_type = other DNA
caaaggcttcacactgcattggggaaatagacttcactaaaataacctag

SEQ ID NO: 3356 - DNA, 50 bp, synthetic construct
  source 1..50: mol_type = other DNA
ccaaattacaaagcaaatgaaaaattaaggaacaacaaaacaaggcctag

SEQ ID NO: 3357 - DNA, 50 bp, synthetic construct
  source 1..50: mol_type = other DNA
agagaacggaatggagtcagtacccagagttgttagataaagacaatatg

SEQ ID NO: 3358 - DNA, 50 bp, synthetic construct
  source 1..50: mol_type = other DNA
ttatctaagatgttcagtttttaatcaaaaaaaattatgagacatgcaaa

SEQ ID NO: 3359 - DNA, 50 bp, synthetic construct
  source 1..50: mol_type = other DNA
gaaataagaacatgtaacccatatgcaagaaaaaatagcaggcaacagaa

SEQ ID NO: 3360 - DNA, 50 bp, synthetic construct
  source 1..50: mol_type = other DNA
gctgactgtgagatgtcagctttaacagacaaggacttcaaaatagctgc

SEQ ID NO: 3361 - DNA, 50 bp, synthetic construct
  source 1..50: mol_type = other DNA
tacaaatatgttcaaagaactaaaggaaatggtgcttaaagaaaaaaagg

SEQ ID NO: 3362 - DNA, 50 bp, synthetic construct
  source 1..50: mol_type = other DNA
taagtatgagggcgatgtttcatcagataaagaatatataaataaaaaga

SEQ ID NO: 3363 - DNA, 50 bp, synthetic construct
  source 1..50: mol_type = other DNA
gagaaattatttaaaagagccatatgaaaattctggaattgaaaagtata

SEQ ID NO: 3364 - DNA, 50 bp, synthetic construct
  source 1..50: mol_type = other DNA
ataaaatgaaaaatttaataggagagctcaacagtagatttgaactggca

SEQ ID NO: 3365 - DNA, 30 bp, synthetic construct
  source 1..30: mol_type = other DNA
gaagaaataatcagtgaacttaaagagaga

SEQ ID NO: 3366 - DNA, 50 bp, synthetic construct
  source 1..50: mol_type = other DNA
tcactatatatgcccagggaaacacagaagttcagaaaagatctgagaag

SEQ ID NO: 3367 - DNA, 50 bp, synthetic construct
  source 1..50: mol_type = other DNA
actttaagttcacattggaggttgacctttggcaaagatacagtctatag

SEQ ID NO: 3368 - DNA, 50 bp, synthetic construct
  source 1..50: mol_type = other DNA
caaaaatgacaactaaaaaaaccataataacaaaaatacttaaatcccag

SEQ ID NO: 3369 - DNA, 50 bp, synthetic construct
  source 1..50: mol_type = other DNA
ggaaagaagaaaatctgatttccagagttagcatgttattacttacaaat

SEQ ID NO: 3370 - DNA, 50 bp, synthetic construct
  source 1..50: mol_type = other DNA
ggccaattttcaaccacaacaaaaaattataagacaaataaagaaatagg

SEQ ID NO: 3371 - DNA, 50 bp, synthetic construct
  source 1..50: mol_type = other DNA
aaataacggctcactcaaagaaaaaaaaccacagtaaaaaccatacctca

SEQ ID NO: 3372 - DNA, 50 bp, synthetic construct
  source 1..50: mol_type = other DNA
aaatggatctactagacaaagactttaaaacaactatgttaaagatattc

SEQ ID NO: 3373 - DNA, 50 bp, synthetic construct
  source 1..50: mol_type = other DNA
aaagaactaaaggacgatgtgtagaaagtcaacaaaatgttctatgaaca

SEQ ID NO: 3374 - DNA, 50 bp, synthetic construct
  source 1..50: mol_type = other DNA
aaatggaaatagcaataaagacatgtaaaacctaaaaagaaagaaacaaa

SEQ ID NO: 3375 - DNA, 50 bp, synthetic construct
  source 1..50: mol_type = other DNA
caaaaaccaaaattctggagccaaaagtttcaataactgaaatgagaaat

SEQ ID NO: 3376 - DNA, 50 bp, synthetic construct
  source 1..50: mol_type = other DNA
ccattacagatactcaaaggtttgagcaagcagaagaaagaatcagcgaa

SEQ ID NO: 3377 - DNA, 20 bp, synthetic construct
  source 1..20: mol_type = other DNA
cttgaagataagacaatgga

SEQ ID NO: 3378 - DNA, 50 bp, synthetic construct
  source 1..50: mol_type = other DNA
aaacatttattcaagaaaatctactaaatctcagcaagagcagcaagagt

SEQ ID NO: 3379 - DNA, 50 bp, synthetic construct
  source 1..50: mol_type = other DNA
ctgtggtatttcagtcatgagtggctcccttttacctgcccctcactaag

SEQ ID NO: 3380 - DNA, 50 bp, synthetic construct
  source 1..50: mol_type = other DNA
ctcaacttagtggaagttccactctgggtgggtgtggtcaagaagatggg

SEQ ID NO: 3381 - DNA, 50 bp, synthetic construct
  source 1..50: mol_type = other DNA
gctttttctcccctcatatcccagtcaagaaatatggcatcccaggagga

SEQ ID NO: 3382 - DNA, 50 bp, synthetic construct
  source 1..50: mol_type = other DNA
ggatctggctgccagcatttctcattctctccaactccaaatgatagagg

SEQ ID NO: 3383 - DNA, 50 bp, synthetic construct
  source 1..50: mol_type = other DNA
ctgaattcctgatgagtgcagctgagaggtagggtgttccctacctccac

SEQ ID NO: 3384 - DNA, 50 bp, synthetic construct
  source 1..50: mol_type = other DNA
ccagaccttgtgtatatactaggcttgtctctataggccaggtgcaacag

SEQ ID NO: 3385 - DNA, 50 bp, synthetic construct
  source 1..50: mol_type = other DNA
gccaagaatactagggccttgatgactctcactccagctagtttgcagag

SEQ ID NO: 3386 - DNA, 50 bp, synthetic construct
  source 1..50: mol_type = other DNA
cagaggtttcatactgggagaagcaacccagcaaggcaagagattcccaa

SEQ ID NO: 3387 - DNA, 50 bp, synthetic construct
  source 1..50: mol_type = other DNA
tgctcaaagcagtggctcagagattttgcccagggggagagtcagtccat

SEQ ID NO: 3388 - DNA, 50 bp, synthetic construct
  source 1..50: mol_type = other DNA
aagaacagatgtagctgaagttctcctcaaaggaactgactttgaaggag

SEQ ID NO: 3389 - DNA, 40 bp, synthetic construct
  source 1..40: mol_type = other DNA
tatgtggcagttcaagcctaaggatactctagaaaatgat

SEQ ID NO: 3390 - DNA, 50 bp, synthetic construct
  source 1..50: mol_type = other DNA
aaaacaatagagcaattagttatcaatggaggataatagctgggtacgat

SEQ ID NO: 3391 - DNA, 50 bp, synthetic construct
  source 1..50: mol_type = other DNA
tccaacaaagccagacagcttgacagagaaatcataaaaagagacaaaga

SEQ ID NO: 3392 - DNA, 50 bp, synthetic construct
  source 1..50: mol_type = other DNA
gacccctgctaaaaccactgtcacctagggtgaccccggtcatgcccaag

SEQ ID NO: 3393 - DNA, 50 bp, synthetic construct
  source 1..50: mol_type = other DNA
gctgctttctctgaggagtaaaatcagaagctgcatacttaggagaaata

SEQ ID NO: 3394 - DNA, 50 bp, synthetic construct
  source 1..50: mol_type = other DNA
gacttcgctaaaatagtccagctaagtcactaaacaaataagcaaacaaa

SEQ ID NO: 3395 - DNA, 50 bp, synthetic construct
  source 1..50: mol_type = other DNA
aaagagccccagaatgtgagagttcagtgtttagagtgctacagtatatt

SEQ ID NO: 3396 - DNA, 50 bp, synthetic construct
  source 1..50: mol_type = other DNA
ctctaaaatgtccagtggttaacaaccatttatgagacatgaaaaaaaaa

SEQ ID NO: 3397 - DNA, 50 bp, synthetic construct
  source 1..50: mol_type = other DNA
aagcaggaaagtgtgaccagacataagaaaaagaaaagcaggcaacagaa

SEQ ID NO: 3398 - DNA, 10 bp, synthetic construct
  source 1..10: mol_type = other DNA
actaccttta

SEQ ID NO: 3399 - DNA, 50 bp, synthetic construct
  source 1..50: mol_type = other DNA
gcagtgggataacatattcaaaatgctgaaaggaaactgtcaaccaagaa

SEQ ID NO: 3400 - DNA, 50 bp, synthetic construct
  source 1..50: mol_type = other DNA
tcctctatctggtaaaacaaccctttaaaaataaaggcaaaattaagata

SEQ ID NO: 3401 - DNA, 24 bp, synthetic construct
  source 1..24: mol_type = other DNA
tttccagataaacaaaaactgagg

SEQ ID NO: 3402 - DNA, 50 bp, synthetic construct
  source 1..50: mol_type = other DNA
ggctgggcgcggtggctcatgcctataatccccgcactttgggaggccga

SEQ ID NO: 3403 - DNA, 50 bp, synthetic construct
  source 1..50: mol_type = other DNA
ggcaggtggatcatgaggtcaggagatcgagaccatcctggccaacatag

SEQ ID NO: 3404 - DNA, 50 bp, synthetic construct
  source 1..50: mol_type = other DNA
tggaatcccatctctaataaaaatacaaaaattagctgagtgtggtggcg

SEQ ID NO: 3405 - DNA, 50 bp, synthetic construct
  source 1..50: mol_type = other DNA
cacacctgtagtcccagctactcaggaggctgaggcaggagaatggcttg

SEQ ID NO: 3406 - DNA, 50 bp, synthetic construct
  source 1..50: mol_type = other DNA
aacccgggaggtggagattgcagtgagccgagatcacgccattgcactcc

SEQ ID NO: 3407 - DNA, 45 bp, synthetic construct
  source 1..45: mol_type = other DNA
agtctgggctacagagcaagacttcatctgaaaaaaaaaaaaaaa

SEQ ID NO: 3408 - DNA, 50 bp, synthetic construct
  source 1..50: mol_type = other DNA
ctggcaagcagctggtaaggtcgaaagagcatgggctttgagtcaaattg

SEQ ID NO: 3409 - DNA, 50 bp, synthetic construct
  source 1..50: mol_type = other DNA
gtctgggttttaatctggctctaccattgattcatttattagacgtggac

SEQ ID NO: 3410 - DNA, 50 bp, synthetic construct
  source 1..50: mol_type = other DNA
cttggacaagtgcctgatctatttttaattctgcaaaatggggagagaga

SEQ ID NO: 3411 - DNA, 21 bp, synthetic construct
  source 1..21: mol_type = other DNA
agagatcttccctccttccag

SEQ ID NO: 3412 - DNA, 50 bp, synthetic construct
  source 1..50: mol_type = other DNA
caactgtcccctctttctttcctgcatcatccacttatctctctcctgga

SEQ ID NO: 3413 - DNA, 50 bp, synthetic construct
  source 1..50: mol_type = other DNA
acatacacataagcatgcagacatgctgcaatagtacccatctgaaaaac

SEQ ID NO: 3414 - DNA, 50 bp, synthetic construct
  source 1..50: mol_type = other DNA
ccaaaaacttcattagaccccacattactgcccaagattgctccatttca

SEQ ID NO: 3415 - DNA, 50 bp, synthetic construct
  source 1..50: mol_type = other DNA
gtgctccattttactgcaaaaatcaaaagggttgatttaattactagagc

SEQ ID NO: 3416 - DNA, 50 bp, synthetic construct; identical to SEQ ID NO: 3408
  source 1..50: mol_type = other DNA

SEQ ID NO: 3417 - DNA, 50 bp, synthetic construct; identical to SEQ ID NO: 3409
  source 1..50: mol_type = other DNA

SEQ ID NO: 3418 - DNA, 50 bp, synthetic construct; identical to SEQ ID NO: 3410
  source 1..50: mol_type = other DNA

SEQ ID NO: 3419 - DNA, 21 bp, synthetic construct
  source 1..21: mol_type = other DNA
agagatcttccctccttccag

SEQ ID NO: 3420 - DNA, 50 bp, synthetic construct; identical to SEQ ID NO: 3412
  source 1..50: mol_type = other DNA

SEQ ID NO: 3421 - DNA, 50 bp, synthetic construct; identical to SEQ ID NO: 3413
  source 1..50: mol_type = other DNA

SEQ ID NO: 3422 - DNA, 50 bp, synthetic construct; identical to SEQ ID NO: 3414
  source 1..50: mol_type = other DNA

SEQ ID NO: 3423 - DNA, 50 bp, synthetic construct; identical to SEQ ID NO: 3415
  source 1..50: mol_type = other DNA

SEQ ID NO: 3424 - skipped

SEQ ID NO: 3425 - DNA, 50 bp, synthetic construct
  source 1..50: mol_type = other DNA
ggctgggcgcagtggctcatgcctgtaatcccagtactttgggaggccga

SEQ ID NO: 3426 - DNA, 50 bp, synthetic construct
  source 1..50: mol_type = other DNA
cgtgggcagatcacgaggtcaggagttcgagaccagcctggccaacatgg

SEQ ID NO: 3427 - DNA, 50 bp, synthetic construct
  source 1..50: mol_type = other DNA
tgaaaccccacctctactaaaaatacaaaaattaggtgggagtgttggtg

SEQ ID NO: 3428 - DNA, 50 bp, synthetic construct
  source 1..50: mol_type = other DNA
ggcgcctgtaatcccagctactcggtacgctgaggcaggagaatcgcttg

SEQ ID NO: 3429 - DNA, 50 bp, synthetic construct
  source 1..50: mol_type = other DNA
aaaccggaaggtggaggttacagtgagccgagatcataccactgcactcc

SEQ ID NO: 3430 - DNA, 50 bp, synthetic construct
  source 1..50: mol_type = other DNA
agtctgcacaacaagagcaaaactccgtctcaaaaaaaaaaaaaaagaaa

SEQ ID NO: 3431 - DNA, 11 bp, synthetic construct
  source 1..11: mol_type = other DNA
gaaagaaagaa

SEQ ID NO: 3432 - DNA, 50 bp, synthetic construct
  source 1..50: mol_type = other DNA
cagagccatctttcctaaaacagaagtctgattagttcatttctctgctc

SEQ ID NO: 3433 - DNA, 50 bp, synthetic construct
  source 1..50: mol_type = other DNA
aaaattttccagcgagaccccatgtcactcaaagtaaaggggcctccttc

SEQ ID NO: 3434 - DNA, 50 bp, synthetic construct
  source 1..50: mol_type = other DNA
ctagccctccagcttcattgcctaccactctcttccttgcgaatttctcc

SEQ ID NO: 3435 - DNA, 50 bp, synthetic construct
  source 1..50: mol_type = other DNA
ccactagcctcactggcctcttttctaatcctttgaaccaagcatgctcc

SEQ ID NO: 3436 - DNA, 50 bp, synthetic construct
  source 1..50: mol_type = other DNA
tttctaagggtctgtgcacctgcttttctgtcttctaaaatgctcttcct

SEQ ID NO: 3437 - DNA, 50 bp, synthetic construct
  source 1..50: mol_type = other DNA
cagatctctccatgtatttgttccttcagtttgttttccctcccccttta

SEQ ID NO: 3438 - DNA, 50 bp, synthetic construct
  source 1..50: mol_type = other DNA
taaaatagaatcccactactaatctcctttaccctgcttcatttttctct

SEQ ID NO: 3439 - DNA, 17 bp, synthetic construct
  source 1..17: mol_type = other DNA
gtatcagttttgaccgt

SEQ ID NO: 3440 - DNA, 50 bp, synthetic construct
  source 1..50: mol_type = other DNA
ggctgggcgcggtggctcacgtctataatcccagcactttggcaggccaa

SEQ ID NO: 3441 - DNA, 50 bp, synthetic construct
  source 1..50: mol_type = other DNA
ggcaggtggatcatgaggtcaggagttcaagaccagcctggccaacatgg

SEQ ID NO: 3442 - DNA, 50 bp, synthetic construct
  source 1..50: mol_type = other DNA
tgaaaccctttctctgctaaacatacaaaaattagccaggcgtggtggca

SEQ ID NO: 3443 - DNA, 50 bp, synthetic construct
  source 1..50: mol_type = other DNA
catgcctgtaatcccagctactcaggatgctgaggtaggagaattgcttg

SEQ ID NO: 3444 - DNA, 50 bp, synthetic construct
  source 1..50: mol_type = other DNA
aacccaggaggtggaggttgcagtgagccgagatcataccactgcactcc

SEQ ID NO: 3445 - DNA, 50 bp, synthetic construct
  source 1..50: mol_type = other DNA
agtctgggcaacagagcaagacttcatcttgagggaaaaaaaaaaaaaga

SEQ ID NO: 3446 - DNA, 50 bp, synthetic construct
  source 1..50: mol_type = other DNA
ggctgggcgcggtggctcatgcctgtaatcccagtagtttgggaggccga

SEQ ID NO: 3447 - DNA, 50 bp, synthetic construct
  source 1..50: mol_type = other DNA
ggcaggcggatcacctgaggtcaggagtttgagaccagcctgaccaacat

SEQ ID NO: 3448 - DNA, 50 bp, synthetic construct
  source 1..50: mol_type = other DNA
ggagaaaccccatctctattaaaaatacaaaattagccgggcgtggtggc

SEQ ID NO: 3449 - DNA, 50 bp, synthetic construct
  source 1..50: mol_type = other DNA
gcatgcctgtaatcctagctactcaggaggctgaggcaggagaactgctt

SEQ ID NO: 3450 - DNA, 50 bp, synthetic construct
  source 1..50: mol_type = other DNA
gaacctgggaggtggagattgcagtgagctgagattgcgccattgcactc

SEQ ID NO: 3451 - DNA, 50 bp, synthetic construct
  source 1..50: mol_type = other DNA
cagcctgggcaactagagcaaaactctgtctcaaaaaaaaaaaaaaaaaa

SEQ ID NO: 3452 - DNA, 50 bp, synthetic construct
  source 1..50: mol_type = other DNA
ggctgggcgcggtggctcatgcctgtaatcccagcactttgggtggccga

SEQ ID NO: 3453 - DNA, 50 bp, synthetic construct
  source 1..50: mol_type = other DNA
ggcgggtggatcatgaggtcaggagatcgagactgtcccggctaacacgg

SEQ ID NO: 3454 - DNA, 50 bp, synthetic construct
  source 1..50: mol_type = other DNA
tgaaaccccgtctctactaaaaatacaaaaaattagctgggcgtggttgc

SEQ ID NO: 3455 - DNA, 50 bp, synthetic construct
  source 1..50: mol_type = other DNA
aggcgcctgtagtcccagctactcgggaggctgaggcaggagaatggcct

SEQ ID NO: 3456 - DNA, 50 bp, synthetic construct
  source 1..50: mol_type = other DNA
gaatctgggaggcggagcttgcagtgagctgagatctcaccactgcactc

SEQ ID NO: 3457 - DNA, 50 bp, synthetic construct
  source 1..50: mol_type = other DNA
cagcctgggcgacagagcgagactccatctgaaaaataaataaataaata

SEQ ID NO: 3458 - DNA, 20 bp, synthetic construct
  source 1..20: mol_type = other DNA
aataaataataaaaaaaatt

SEQ ID NO: 3459 - DNA, 50 bp, synthetic construct
  source 1..50: mol_type = other DNA
ggctgggcgcagtggctcatgtctgtaatcccggcactttgggagaccga

SEQ ID NO: 3460 - DNA, 50 bp, synthetic construct
  source 1..50: mol_type = other DNA
ggcaggcggatcacttgaggtcaggagttcgagaccagcctggccaacat

SEQ ID NO: 3461 - DNA, 50 bp, synthetic construct
  source 1..50: mol_type = other DNA
ggtgaaatcccatctctactaaaaatacaaaaattagctgaatgtggtgg

SEQ ID NO: 3462 - DNA, 50 bp, synthetic construct
  source 1..50: mol_type = other DNA
tgggcacctgtagtcccagctactcgggaggctgagacaggagaaatgct

SEQ ID NO: 3463 - DNA, 50 bp, synthetic construct
  source 1..50: mol_type = other DNA
tgaactcaggagacagagattgcagtgagccgagatggtgccactgcact

SEQ ID NO: 3464 - DNA, 47 bp, synthetic construct
  source 1..47: mol_type = other DNA
ccaacctgggtgacagagcaagactgtctcaaaaaaaaaaaaaaatt

SEQ ID NO: 3465 - DNA, 50 bp, synthetic construct
  source 1..50: mol_type = other DNA
gaaagagcatgggctttgaagtcaccgacatgggtttgattctggctctg

SEQ ID NO: 3466 - DNA, 25 bp, synthetic construct
  source 1..25: mol_type = other DNA
gaaagagcatgggctttgagtcagc

SEQ ID NO: 3467 - DNA, 30 bp, synthetic construct
  source 1..30: mol_type = other DNA
aagagcatgggctttggagtcagattgctg

SEQ ID NO: 3468 - DNA, 30 bp, synthetic construct
  source 1..30: mol_type = other DNA
gaaagagcatgggctttgtaatcaaatcag

SEQ ID NO: 3469 - DNA, 30 bp, synthetic construct
  source 1..30: mol_type = other DNA
gaaagagcatgggctttgaaaattcatgaa

SEQ ID NO: 3470 - DNA, 30 bp, synthetic construct
  source 1..30: mol_type = other DNA
caaaatggggagagagagagagattgatag

SEQ ID NO: 3471 - DNA, 20 bp, synthetic construct
  source 1..20: mol_type = other DNA
acatacacataagcatgcag

SEQ ID NO: 3472 - DNA, 20 bp, synthetic construct
  source 1..20: mol_type = other DNA
aaaaacccaaaaacttcatt

SEQ ID NO: 3473 - DNA, 30 bp, synthetic construct
  source 1..30: mol_type = other DNA
tcgaaagagcatgggctttgagtcaaattg

SEQ ID NO: 3474 - DNA, 30 bp, synthetic construct; identical to SEQ ID NO: 3473
  source 1..30: mol_type = other DNA

SEQ ID NO: 3475 - DNA, 30 bp, synthetic construct; identical to SEQ ID NO: 3473
  source 1..30: mol_type = other DNA

SEQ ID NO: 3476 - DNA, 30 bp, synthetic construct
  source 1..30: mol_type = other DNA
ctgcaaaatggggagagagaagagatcttc

SEQ ID NO: 3477 - DNA, 30 bp, synthetic construct
  source 1..30: mol_type = other DNA
tctgaaaaacccaaaaacttcattagaccc

SEQ ID NO: 3478 - DNA, 295 bp, synthetic construct
  source 1..295: mol_type = other DNA
ggcgcagtggctcatgcctgtaatcccagtactttgggaggccgacgtgggcagatcacgaggtcaggagttcgagaccagcctggccaacatggtgaaaccccacctctactaaaaatacaaaaattaggtgggagtgttggtgggcgcctgtaatcccagctactcggtacgctgaggcaggagaatcgcttgaaaccggaaggtggaggttacagtgagccgagatcataccactgcactccagtctgcacaacaagagcaaaactccgtctcaaaaaaaaaaaaaaagaaa

SEQ ID NO: 3479 - DNA, 303 bp, synthetic construct
  source 1..303: mol_type = other DNA
gcagtggctcatgcctgtaatcccagtactttgggaggccgacgtgggcagatcacgaggtcaggagttcgagaccagcctggccaacatggtgaaaccccacctctactaaaaatacaaaaattaggtgggagtgttggtgggcgcctgtaatcccagctactcggtacgctgaggcaggagaatcgcttgaaaccggaaggtggaggttacagtgagccgagatcataccactgcactccagtctgcacaacaagagcaaaactccgtctcaaaaaaaaaaaaaaagaaagaaagaaagaa

SEQ ID NO: 3480 - DNA, 32 bp, synthetic construct
  source 1..32: mol_type = other DNA
gaatttctccccactagcctcactggcctctt

SEQ ID NO: 3481 - DNA, 29 bp, synthetic construct
  source 1..29: mol_type = other DNA
gccctccagcttcattgcctaccactctc

SEQ ID NO: 3482 - DNA, 50 bp, synthetic construct
  source 1..50: mol_type = other DNA
actggtcactgggtgaccttgggcaagtcactttccctctcaggtcttcc

SEQ ID NO: 3483 - DNA, 40 bp, synthetic construct
  source 1..40: mol_type = other DNA
cctctccatcagcaaactcctaaagcttaactaaacagtc

SEQ ID NO: 3484 - skipped

SEQ ID NO: 3485 - DNA, 50 bp, synthetic construct
  source 1..50: mol_type = other DNA
gccaggtgtgatggtgcacacctgtaatcccggcactttgggaggccaag

SEQ ID NO: 3486 - DNA, 50 bp, synthetic construct
  source 1..50: mol_type = other DNA
atgggaggatcatctgggctgaggagttcaaggctgcagtgagctatgat

SEQ ID NO: 3487 - DNA, 50 bp, synthetic construct
  source 1..50: mol_type = other DNA
tgcatcactgcactctaacctgggtgacagagtgagaccctgactctaaa

SEQ ID NO: 3488 - DNA, 15 bp, synthetic construct
  source 1..15: mol_type = other DNA
taaaataaaataaaa

SEQ ID NO: 3489 - DNA, 47 bp, synthetic construct
  source 1..47: mol_type = other DNA
gggtgaccttgggcaagtcactttccctctcaggtcttcccctctcc

SEQ ID NO: 3490 - DNA, 26 bp, synthetic construct
  source 1..26: mol_type = other DNA
taatcccggcactttgggaggccaag

SEQ ID NO: 3491 - DNA, 50 bp, synthetic construct; identical to SEQ ID NO: 3486
  source 1..50: mol_type = other DNA

SEQ ID NO: 3492 - DNA, 40 bp, synthetic construct
  source 1..40: mol_type = other DNA
tgcatcactgcactctaacctgggtgacagagtgagaccc

SEQ ID NO: 3493 - DNA, 50 bp, synthetic construct
  source 1..50: mol_type = other DNA
ccagagatttcatcctaaaaatgtcataggatcgtatgactatcttgttt

SEQ ID NO: 3494 - DNA, 50 bp, synthetic construct
  source 1..50: mol_type = other DNA
caaagtctccactcacttcctgtttcataaagaacaaagtcctaacccca

SEQ ID NO: 3495 - DNA, 50 bp, synthetic construct
  source 1..50: mol_type = other DNA
ttacagtggtcccaattacaccccaagctacatctcctgccagttctcat

SEQ ID NO: 3496 - DNA, 49 bp, synthetic construct
  source 1..49: mol_type = other DNA
cctcctgaatcgcagcctcttattctggtcacacacaaccatttcactc

SEQ ID NO: 3497 - DNA, 50 bp, synthetic construct
  source 1..50: mol_type = other DNA
aaatgaaggtaacacaaggacagcctctgggaagcacctagcattcagca

SEQ ID NO: 3498 - DNA, 24 bp, synthetic construct
  source 1..24: mol_type = other DNA
ggcactcaataaatgttaactgtt

SEQ ID NO: 3499 - DNA, 50 bp, synthetic construct; identical to SEQ ID NO: 3493
  source 1..50: mol_type = other DNA

SEQ ID NO: 3500 - DNA, 50 bp, synthetic construct; identical to SEQ ID NO: 3494
  source 1..50: mol_type = other DNA

SEQ ID NO: 3501 - DNA, 50 bp, synthetic construct; identical to SEQ ID NO: 3495
  source 1..50: mol_type = other DNA

SEQ ID NO: 3502 - DNA, 50 bp, synthetic construct
  source 1..50: mol_type = other DNA
cctcctgaatcgcagcctcttattctggtcacacacaaccatttcactct

SEQ ID NO: 3503 - DNA, 50 bp, synthetic construct
  source 1..50: mol_type = other DNA
tcaaagtctccatcttgaggaactttccagttatcaggaaaaacgttttt

SEQ ID NO: 3504 - DNA, 50 bp, synthetic construct
  source 1..50: mol_type = other DNA
ggacatagggaagggttcatgcatgttctgattacagttttcgtgactct

SEQ ID NO: 3505 - DNA, 50 bp, synthetic construct
  source 1..50: mol_type = other DNA
tattcttgaagtcttgcttatcaaagtagtccatgaaagatggtctttgt

SEQ ID NO: 3506 - DNA, 50 bp, synthetic construct
  source 1..50: mol_type = other DNA
acttgtggtgaggttgcatttccttaggtaaacaaagaacataaggaagg

SEQ ID NO: 3507 - DNA, 50 bp, synthetic construct
  source 1..50: mol_type = other DNA
tataagttcttacatttaaggaagtattttctttgaagtatgattttttt

SEQ ID NO: 3508 - DNA, 50 bp, synthetic construct
  source 1..50: mol_type = other DNA
atgaagccatataataaatttgcactggtcagattcaaggccaacataat

SEQ ID NO: 3509 - DNA, 21 bp, synthetic construct
  source 1..21: mol_type = other DNA
taatttcataaagaacaaagt

SEQ ID NO: 3510 - DNA, 23 bp, synthetic construct
  source 1..23: mol_type = other DNA
atttcatcctaaaaatgtaatag

SEQ ID NO: 3511 - DNA, 20 bp, synthetic construct
  source 1..20: mol_type = other DNA
aaccccattacagtggtccc

SEQ ID NO: 3512 - DNA, 22 bp, synthetic construct
  source 1..22: mol_type = other DNA
ctcctctcacttcctgtttcat

SEQ ID NO: 3513 - DNA, 50 bp, synthetic construct
  source 1..50: mol_type = other DNA
gcacctagaacagtgcctgactcgtagcaggcactcaataaatgtttatt

SEQ ID NO: 3514 - DNA, 30 bp, synthetic construct
  source 1..30: mol_type = other DNA
gcatacagcaggcactcaataaatgttagc

SEQ ID NO: 3515 - DNA, 30 bp, synthetic construct
  source 1..30: mol_type = other DNA
agcattcagcaggcactcaatgaatgttct

SEQ ID NO: 3516 - DNA, 30 bp, synthetic construct
  source 1..30: mol_type = other DNA
cagcaggcactcaataaatgtttactgaat

SEQ ID NO: 3517 - DNA, 50 bp, synthetic construct
  source 1..50: mol_type = other DNA
aggaggcctcgggtctggcctcagctgcctcccaactctctatgatcgag

SEQ ID NO: 3518 - DNA, 50 bp, synthetic construct
  source 1..50: mol_type = other DNA
aacaagtgttgctttcccgcttttcgcctcactttaatcgtctattaaaa

SEQ ID NO: 3519 - DNA, 16 bp, synthetic construct
  source 1..16: mol_type = other DNA
agtgggagagaaacta

SEQ ID NO: 3520 - DNA, 46 bp, synthetic construct
  source 1..46: mol_type = other DNA
cggtgcccgcgcagtgggcgcttggtaaatatttgttgaattgaat

SEQ ID NO: 3521 - DNA, 40 bp, synthetic construct
  source 1..40: mol_type = other DNA
cctcggggccctatgttctggcctcagctgcccactctcc

SEQ ID NO: 3522 - DNA, 50 bp, synthetic construct
  source 1..50: mol_type = other DNA
gcttggtaaatatttgttgaatggagtctctcttcttctcttcttgtctg

SEQ ID NO: 3523 - DNA, 30 bp, synthetic construct
  source 1..30: mol_type = other DNA
atgcttagtacttgttaagaaatggtgaat

SEQ ID NO: 3524 - DNA, 36 bp, synthetic construct
  source 1..36: mol_type = other DNA
cttggtaaatatttgttgaaagaaactgttgaataa

SEQ ID NO: 3525 - DNA, 50 bp, synthetic construct
  source 1..50: mol_type = other DNA
cttggtaaatatttgttgaatgaacaaatgtcatattcttttccaacaac

SEQ ID NO: 3526 - DNA, 50 bp, synthetic construct
  source 1..50: mol_type = other DNA
aatagctatgtttctaataataattgttaccgagtgtttagtaagtacca

SEQ ID NO: 3527 - DNA, 50 bp, synthetic construct
  source 1..50: mol_type = other DNA
aactctagactacgtttttatgattgaacctcatttagttctcacaacta

SEQ ID NO: 3528 - DNA, 50 bp, synthetic construct
  source 1..50: mol_type = other DNA
attgtgatggaaaaaatgataaggaaactgaggcttagaaacatgaagta

SEQ ID NO: 3529 - DNA, 50 bp, synthetic construct
  source 1..50: mol_type = other DNA
acttgcctgaagttagacaactgatcagaagattgacccagagagcttgt

SEQ ID NO: 3530 - DNA, 20 bp, synthetic construct
  source 1..20: mol_type = other DNA
ctccagaatccagtctgaat

SEQ ID NO: 3531 - DNA, 46 bp, synthetic construct
  source 1..46: mol_type = other DNA
cttggtaaatatttgttgaatgaatgaactatctatggatatgaat

SEQ ID NO: 3532 - DNA, 30 bp, synthetic construct
  source 1..30: mol_type = other DNA
ttggtaaatatttgttgaatgtaatgaata

SEQ ID NO: 3533 - DNA, 50 bp, synthetic construct
  source 1..50: mol_type = other DNA
aatattaggtcttagcccccagttcctgacacagaatccctaaaaccttt

SEQ ID NO: 3534 - DNA, 50 bp, synthetic construct
  source 1..50: mol_type = other DNA
ggaatttcctgggtgacaggagtgtcgttagttctaatgaggtgactctt

SEQ ID NO: 3535 - DNA, 50 bp, synthetic construct
  source 1..50: mol_type = other DNA
ggtgggctgccaaatgcagctggttaccagagagaccaagccatggttag

SEQ ID NO: 3536 - DNA, 50 bp, synthetic construct
  source 1..50: mol_type = other DNA
aaggttggagctttcagcaccttcctacaccttggggaagggagacgggc

SEQ ID NO: 3537 - DNA, 50 bp, synthetic construct
  source 1..50: mol_type = other DNA
tggagattgggttaatatgcctctgtaatggagcctccgtgaaacccctc

SEQ ID NO: 3538 - DNA, 50 bp, synthetic construct
  source 1..50: mol_type = other DNA
aaaggtgggattgggggcttctggttggtgaccacctggtggtgcgggga

SEQ ID NO: 3539 - DNA, 50 bp, synthetic construct
  source 1..50: mol_type = other DNA
gggtggcatccagtgagggcacggtgctctgcgccctccccacagcttgg

SEQ ID NO: 3540 - DNA, 50 bp, synthetic construct
  source 1..50: mol_type = other DNA
cctgtgtgcctctccatctggctgttcagctatatcctttgtgatagact

SEQ ID NO: 3541 - DNA, 50 bp, synthetic construct
  source 1..50: mol_type = other DNA
ttaaaataaacctgtaaatagaaatgtttccttgagttttgcaaaatgtt

SEQ ID NO: 3542 - DNA, 50 bp, synthetic construct
  source 1..50: mol_type = other DNA
atagcacactattgaacccaaagagagggtcatgggaactcttgatttat

SEQ ID NO: 3543 - DNA, 50 bp, synthetic construct
  source 1..50: mol_type = other DNA
atagcctgtcggttgggagaatgagaagccctgtcttgcgactggcatct

SEQ ID NO: 3544 - DNA, 50 bp, synthetic construct
  source 1..50: mol_type = other DNA
gaattgggggcagtcttgtgggactgaggctttacctgtggaggctgatg

SEQ ID NO: 3545 - DNA, 50 bp, synthetic construct
  source 1..50: mol_type = other DNA
ccaactccaggaagatagcatcagaattgaattgaattggaggacaccca

SEQ ID NO: 3546 - DNA, 50 bp, synthetic construct
  source 1..50: mol_type = other DNA
gttggggtccccagagaagtggagaattgcttggggcagaaaatccacac

SEQ ID NO: 3547 - DNA, 49 bp, synthetic construct
  source 1..49: mol_type = other DNA
ttttggtgtcagaggtgtgtaagagtgtagagaagaaatggaatgtttt

SEQ ID NO: 3548 - DNA, 50 bp, synthetic construct
  source 1..50: mol_type = other DNA
agaaagacaaacatcgcatgttatcacttacttgtgggatttaaaattca

SEQ ID NO: 3549 - DNA, 50 bp, synthetic construct
  source 1..50: mol_type = other DNA
aaacaatcgcatggagatagagagtggaagaatggttaccggaggctggg

SEQ ID NO: 3550 - DNA, 50 bp, synthetic construct
  source 1..50: mol_type = other DNA
aagggtagtaggggatgggctaacaggtaccaaaaaaaaatagaatgaat

SEQ ID NO: 3551 - DNA, 50 bp, synthetic construct
  source 1..50: mol_type = other DNA
acgacgtagtatttcatagtacaacagggtgactgtagtcaataatttaa

SEQ ID NO: 3552 - DNA, 50 bp, synthetic construct
  source 1..50: mol_type = other DNA
ttgtacatttaaaaataactaaaagtataattagattgtctgtaacacaa

SEQ ID NO: 3553 - DNA, 50 bp, synthetic construct
  source 1..50: mol_type = other DNA
aggataaattcttgaggggatggataccccattttacatgatgtgatttt

SEQ ID NO: 3554 - DNA, 50 bp, synthetic construct
  source 1..50: mol_type = other DNA
ctacacattgcatgcctgtatcaaaatatctcatgtatcccacaaatata

SEQ ID NO: 3555 - DNA, 42 bp, synthetic construct
  source 1..42: mol_type = other DNA
tatacctactatgtacccacaaaaattaaaaataaaaattaa

SEQ ID NO: 3556 - DNA, 50 bp, synthetic construct
  source 1..50: mol_type = other DNA
ggccaggcgcggtggttcacacctgtaatcccagcactttgggaggccga

SEQ ID NO: 3557 - DNA, 50 bp, synthetic construct
  source 1..50: mol_type = other DNA
ggtgggtggatcatgaggtcaggagatcgagaccatcctggccaacatgg

SEQ ID NO: 3558 - DNA, 50 bp, synthetic construct
  source 1..50: mol_type = other DNA
tgaaacccaatctctactaaaagtacaaaaaaaaattagctgggtatgtt

SEQ ID NO: 3559 - DNA, 50 bp, synthetic construct
  source 1..50: mol_type = other DNA
ggcaggcgcctatagtcctggctactcaggaggctgaggcaggagaatcg

SEQ ID NO: 3560 - DNA, 50 bp, synthetic construct
  source 1..50: mol_type = other DNA
cttgaacccaggaggcagaggttgcagtgagccgagattgtgccactgca

SEQ ID NO: 3561 - DNA, 50 bp, synthetic construct
  source 1..50: mol_type = other DNA
ctccagcctgggcaacagagtgagactccatctcaaaaaaataaaataaa

SEQ ID NO: 3562 - DNA, 34 bp, synthetic construct
  source 1..34: mol_type = other DNA
ataattaaaattaaaatttaaaaagttagaattt

SEQ ID NO: 3563 - DNA, 50 bp, synthetic construct
  source 1..50: mol_type = other DNA
ttgctcccaagggaacaaaatccgttcttaggaggcagaaccatctgata

SEQ ID NO: 3564 - DNA, 50 bp, synthetic construct
  source 1..50: mol_type = other DNA
tgagaatggtctgtggccctccaaagaggcaagtacatgacacatataca

SEQ ID NO: 3565 - DNA, 50 bp, synthetic construct
  source 1..50: mol_type = other DNA
gtatgtctgtggtattaaaatttcatggtaggagggaaggcaattaggaa

SEQ ID NO: 3566 - DNA, 50 bp, synthetic construct
  source 1..50: mol_type = other DNA
aataaatatctaaaaagcctccttgtaaataataatgggaaaaaaaaggc

SEQ ID NO: 3567 - DNA, 12 bp, synthetic construct
  source 1..12: mol_type = other DNA
tgagcagcgttg

SEQ ID NO: 3568 - DNA, 50 bp, synthetic construct
  source 1..50: mol_type = other DNA
ctgtataataaactggtaaacatgtttccctgagttctatgagccactct

SEQ ID NO: 3569 - DNA, 50 bp, synthetic construct
  source 1..50: mol_type = other DNA
agcaaattaactggacctggttacgaggggttcatggaaactccaatttt

SEQ ID NO: 3570 - DNA, 50 bp, synthetic construct
  source 1..50: mol_type = other DNA
tagccagctagtcagaagcacaggtaaaacaacctggggcttgcacctgg

SEQ ID NO: 3571 - DNA, 50 bp, synthetic construct
  source 1..50: mol_type = other DNA
cattggaagtgggcagcagtcttgtgggactgagccctcaaacctgtgga

SEQ ID NO: 3572 - DNA, 50 bp, synthetic construct
  source 1..50: mol_type = other DNA
tctgatactatctccaggcagatagtgtcagaattgaattggaggacacc

SEQ ID NO: 3573 - DNA, 50 bp, synthetic construct
  source 1..50: mol_type = other DNA
cagctggtgtctgaggcagaactgatgacttgcttgatgtgtggggaaaa

SEQ ID NO: 3574 - DNA, 50 bp, synthetic construct
  source 1..50: mol_type = other DNA
aaacaccttacatcttgtgtcagaagcgtgttgtgagagtatagcaggag

SEQ ID NO: 3575 - DNA, 30 bp, synthetic construct
  source 1..30: mol_type = other DNA
aaactgagtctgtttttctactcatacaca

SEQ ID NO: 3576 - DNA, 50 bp, synthetic construct
  source 1..50: mol_type = other DNA
ttcctaaactgtgggatttcaatttgcaatttcagagagcttctggattg

SEQ ID NO: 3577 - DNA, 50 bp, synthetic construct
  source 1..50: mol_type = other DNA
ctgaacatggggagcttctgggaaggtgacatacctggaaagggcttgga

SEQ ID NO: 3578 - DNA, 50 bp, synthetic construct
  source 1..50: mol_type = other DNA
aaccccgtgccccttcccatataccttgccctatgcacctctttatctgg

SEQ ID NO: 3579 - DNA, 50 bp, synthetic construct
  source 1..50: mol_type = other DNA
ctggctgttcatctgtattctttataatatcccttataaatataataaac

SEQ ID NO: 3580 - DNA, 50 bp, synthetic construct
  source 1..50: mol_type = other DNA
cagtacaagcaagtgtttctctgagttttatgagctgctctagcaaatca

SEQ ID NO: 3581 - DNA, 50 bp, synthetic construct
  source 1..50: mol_type = other DNA
atcaaaccagagaagggggttaaggaaacctcgaatttatagctaaatca

SEQ ID NO: 3582 - DNA, 50 bp, synthetic construct
  source 1..50: mol_type = other DNA
aacagcagttgtaggtagcctacaactttcagttgatgtctgaagtggag

SEQ ID NO: 3583 - DNA, 50 bp, synthetic construct
  source 1..50: mol_type = other DNA
ggaagtcttgtgggactgagcccctaacctgtgggatctgatgctgtttc

SEQ ID NO: 3584 - DNA, 50 bp, synthetic construct
  source 1..50: mol_type = other DNA
caggtagggagtgtcagaattgagttaaatcgtaggacacccagttggtg

SEQ ID NO: 3585 - DNA, 50 bp, synthetic construct
  source 1..50: mol_type = other DNA
accactggagaactgacatgtgggaaagcaaaagcaagcccacacgtctg

SEQ ID NO: 3586 - DNA, 50 bp, synthetic construct
  source 1..50: mol_type = other DNA
aacacagaagtgtctgtgttgaatgtgagagtaggaaaagcagtttaatt

SEQ ID NO: 3587 - skipped

SEQ ID NO: 3588 - DNA, 50 bp, synthetic construct
  source 1..50: mol_type = other DNA
agaacagaggaaaggatccgtcactacccaccttcataagtgcaccaagt

SEQ ID NO: 3589 - DNA, 50 bp, synthetic construct
  source 1..50: mol_type = other DNA
tgctcaaacactttatgtttttgagagttttcagaggaggggaaaaaggg

SEQ ID NO: 3590 - DNA, 50 bp, synthetic construct
  source 1..50: mol_type = other DNA
gaaataattgctttaattaaattttatagataattcagatgacctaaata

SEQ ID NO: 3591 - DNA, 50 bp, synthetic construct
  source 1..50: mol_type = other DNA
ttattggaccatgtgaatgcatacaccaaaaaagccttcctccactcctg

SEQ ID NO: 3592 - DNA, 25 bp, synthetic construct
  source 1..25: mol_type = other DNA
tcatctagccagccagctctctaca

SEQ ID NO: 3593 - DNA, 50 bp, synthetic construct
  source 1..50: mol_type = other DNA
gttcctgacacttctatttcctgggaatttcctgggtaataggagcatct

SEQ ID NO: 3594 - DNA, 50 bp, synthetic construct
  source 1..50: mol_type = other DNA
tttattctaacgagacaactgttggtgggctcctgagtgggactggtcac

SEQ ID NO: 3595 - DNA, 50 bp, synthetic construct
  source 1..50: mol_type = other DNA
cagaaagaccaagccatgatcataagcttggagctttcagctccaccccc

SEQ ID NO: 3596 - DNA, 50 bp, synthetic construct
  source 1..50: mol_type = other DNA
atcctccaggaaggggagaggggctggggattgagttaataatcaatcat

SEQ ID NO: 3597 - DNA, 50 bp, synthetic construct
  source 1..50: mol_type = other DNA
acctaatcaatcatgcctatagaaacctctataaaaatccctgaactatg

SEQ ID NO: 3598 - DNA, 50 bp, synthetic construct
  source 1..50: mol_type = other DNA
gagtttggagagcttttgggttgttgaacatgtggaggcactgggatggt

SEQ ID NO: 3599 - DNA, 50 bp, synthetic construct
  source 1..50: mol_type = other DNA
ggtgaggcggagaactcatgaaagcccctcacctcttcccacataccttg

SEQ ID NO: 3600 - DNA, 50 bp, synthetic construct
  source 1..50: mol_type = other DNA
ccctgtgtttctcttcacctggctgttcatctacatcctttgccatatcc

SEQ ID NO: 3601 - DNA, 50 bp, synthetic construct
  source 1..50: mol_type = other DNA
tttgccataaactggtgaatgagagttgtttccctgagttctgtgagcca

SEQ ID NO: 3602 - DNA, 50 bp, synthetic construct
  source 1..50: mol_type = other DNA
ttctagcaaatgatcaaacctgagggtggggggtataggaacctcccatt

SEQ ID NO: 3603 - DNA, 50 bp, synthetic construct
  source 1..50: mol_type = other DNA
tatagctggtcagtcagaagttccagaggcctggacttacaattggcctc

SEQ ID NO: 3604 - DNA, 50 bp, synthetic construct
  source 1..50: mol_type = other DNA
tgaaatggggggcagtcttgtgggactgagcccttaatctgtgccatttg

SEQ ID NO: 3605 - DNA, 50 bp, synthetic construct
  source 1..50: mol_type = other DNA
actccaaccccaagtaacatagtgtcagaattgagttaaattgtagcaca

SEQ ID NO: 3606 - DNA, 20 bp, synthetic construct
  source 1..20: mol_type = other DNA
cccagctgttggagaattgg

SEQ ID NO: 3607 - DNA, 50 bp, synthetic construct
  source 1..50: mol_type = other DNA
cccagttcctgacacagagctactagatcccttggaatttcctgggtcat

SEQ ID NO: 3608 - DNA, 50 bp, synthetic construct
  source 1..50: mol_type = other DNA
aggaatgccttttgtgctaatgaggctactcctgctggctcctggattgg

SEQ ID NO: 3609 - DNA, 50 bp, synthetic construct
  source 1..50: mol_type = other DNA
ggctggtcaccagaaagaccaagtgtgattagaagcttggaactttcagc

SEQ ID NO: 3610 - DNA, 50 bp, synthetic construct
  source 1..50: mol_type = other DNA
ccctctctccatcctctggggagaagagaggagctggagattgggtaata

SEQ ID NO: 3611 - DNA, 50 bp, synthetic construct
  source 1..50: mol_type = other DNA
atcaatcatgcctacatgatgacttctcctaaagtacagggttctgagag

SEQ ID NO: 3612 - DNA, 50 bp, synthetic construct
  source 1..50: mol_type = other DNA
tttctggttggtgaacacatacatgtgtcaggaaggtagcaaacagaact

SEQ ID NO: 3613 - DNA, 50 bp, synthetic construct
  source 1..50: mol_type = other DNA
ccacaggatagatgctgctgggcccaggacccttccagattttgccctat

SEQ ID NO: 3614 - DNA, 50 bp, synthetic construct
  source 1..50: mol_type = other DNA
gtatctcttcaactggctgttcatctgtatcctttacttaatcctttaca

SEQ ID NO: 3615 - DNA, 50 bp, synthetic construct
  source 1..50: mol_type = other DNA
taataaaccagtaaatgtaagtgtctcctgagttttgtcagctattctag

SEQ ID NO: 3616 - DNA, 50 bp, synthetic construct
  source 1..50: mol_type = other DNA
caaatgatgaaaccctagcagggagttgtgggaatctccaaattatagct

SEQ ID NO: 3617 - DNA, 50 bp, synthetic construct
  source 1..50: mol_type = other DNA
ggttggtctgatgcacaggtgacaacccagtcttgtaactgacattggaa

SEQ ID NO: 3618 - DNA, 50 bp, synthetic construct
  source 1..50: mol_type = other DNA
acggggggaaatttgctggggcggagcacttaaactgcacgggatctgat

SEQ ID NO: 3619 - DNA, 50 bp, synthetic construct
  source 1..50: mol_type = other DNA
gttatttccaggtagagtgttagaattggattcaattgtaggacacccag

SEQ ID NO: 3620 - DNA, 50 bp, synthetic construct
  source 1..50: mol_type = other DNA
ttggtgtccccagataactggagaattgcttagaaaacactcccacacct

SEQ ID NO: 3621 - DNA, 10 bp, synthetic construct
  source 1..10: mol_type = other DNA
gtttggtggc

SEQ ID NO: 3622 - DNA, 50 bp, synthetic construct
  source 1..50: mol_type = other DNA
agaccaaggcatgattaaagggttgggactttcagcacccccacctgcct

SEQ ID NO: 3623 - DNA, 50 bp, synthetic construct
  source 1..50: mol_type = other DNA
ccttaggggaaaggagaggggctagagattgggttatcaccaaaggtcaa

SEQ ID NO: 3624 - DNA, 50 bp, synthetic construct
  source 1..50: mol_type = other DNA
tgatttaatcaattgtgcctctataatgaaacctccattaaaatccctaa

SEQ ID NO: 3625 - DNA, 50 bp, synthetic construct
  source 1..50: mol_type = other DNA
acaacaagattcacagagcttccaggttgttgaacacatccaggtgcttg

SEQ ID NO: 3626 - DNA, 50 bp, synthetic construct
  source 1..50: mol_type = other DNA
gggcatggcgcccagagacacatggcatctctgtggtccctcccacatac

SEQ ID NO: 3627 - DNA, 50 bp, synthetic construct
  source 1..50: mol_type = other DNA
ctcaccataagcatctttcatcaggctgttcatctctatcctttgtaaca

SEQ ID NO: 3628 - DNA, 50 bp, synthetic construct
  source 1..50: mol_type = other DNA
tccattataatacactggtaaggtaagtaaagtgccttcttgagttctgt

SEQ ID NO: 3629 - DNA, 50 bp, synthetic construct
  source 1..50: mol_type = other DNA
gagccagtctagcaaattattgaacccaaggatggggtcatgggaactcc

SEQ ID NO: 3630 - DNA, 50 bp, synthetic construct
  source 1..50: mol_type = other DNA
cgatttgtagcctgtaggtcaaaagtatggaaggcccagacttccagctg

SEQ ID NO: 3631 - DNA, 40 bp, synthetic construct
  source 1..40: mol_type = other DNA
gcatctgaattggggccagtcttgtgggactgagcccttg

SEQ ID NO: 3632 - DNA, 50 bp, synthetic construct
  source 1..50: mol_type = other DNA
ttggaatttcctgggtaatagtagcgtctttttttctcatggggcacctc

SEQ ID NO: 3633 - DNA, 50 bp, synthetic construct
  source 1..50: mol_type = other DNA
ttggtgggctcctggatagggctggtcaccagaaagaccaagccatgatt

SEQ ID NO: 3634 - DNA, 50 bp, synthetic construct
  source 1..50: mol_type = other DNA
agaaacttggaactttcagctcagctccccatcctccatgaaggggagag

SEQ ID NO: 3635 - DNA, 50 bp, synthetic construct
  source 1..50: mol_type = other DNA
gggcggaaacctgagttagtaattggtggtgcctatgtgatgaagcctcc

SEQ ID NO: 3636 - DNA, 50 bp, synthetic construct
  source 1..50: mol_type = other DNA
atgaaaatccctgaactgtggggtttggagagcttccgggctgctgaaca

SEQ ID NO: 3637 - DNA, 50 bp, synthetic construct
  source 1..50: mol_type = other DNA
cgcggaggtgctggaagggcgatgcaccctggagggggcgtggaagccac

SEQ ID NO: 3638 - DNA, 50 bp, synthetic construct
  source 1..50: mol_type = other DNA
ctgccccctcccccatacctggcccaatgcatctctcccatctggctgtc

SEQ ID NO: 3639 - DNA, 50 bp, synthetic construct
  source 1..50: mol_type = other DNA
catctgtatcctttgtaatatccttcctaataaacaggtgaacataaata

SEQ ID NO: 3640 - DNA, 50 bp, synthetic construct
  source 1..50: mol_type = other DNA
aagtggttttctgagttctgtgatccatcctagcaaattatcaaatccaa

SEQ ID NO: 3641 - DNA, 50 bp, synthetic construct
  source 1..50: mol_type = other DNA
ggagggcaccatgggaactccagtgtacagcctgtcagtcaggaacacgg

SEQ ID NO: 3642 - DNA, 50 bp, synthetic construct
  source 1..50: mol_type = other DNA
gtcacagcctggggcttgtgactggcatctaaagtaggggcagtcttgtg

SEQ ID NO: 3643 - DNA, 10 bp, synthetic construct
  source 1..10: mol_type = other DNA
ggactaagtc

SEQ ID NO: 3644 - DNA, 50 bp, synthetic construct
  source 1..50: mol_type = other DNA
agttcctgacacagagttcctagaactcttgtaattgcccagatgacagg

SEQ ID NO: 3645 - DNA, 50 bp, synthetic construct
  source 1..50: mol_type = other DNA
agcatcttttgttctaatgaggcaactcttggtgggctgctggatggggg

SEQ ID NO: 3646 - DNA, 50 bp, synthetic construct
  source 1..50: mol_type = other DNA
cggatgcctgaaagaccaagccatgattagaagcttgaaactttcagccc

SEQ ID NO: 3647 - DNA, 50 bp, synthetic construct
  source 1..50: mol_type = other DNA
ccatttcctaggataggagaaaggctggagattgagttaataatcagtca

SEQ ID NO: 3648 - DNA, 50 bp, synthetic construct
  source 1..50: mol_type = other DNA
tgtctacatgatgaagccaccataaaaatccctgaactacaggttcaagg

SEQ ID NO: 3649 - DNA, 50 bp, synthetic construct
  source 1..50: mol_type = other DNA
ggcttcccagttgtgaacacatccatgtgccaggaggggtggtgcacccc

SEQ ID NO: 3650 - DNA, 50 bp, synthetic construct
  source 1..50: mol_type = other DNA
aactccatggggacagaagctcctgcactaggaacccttctagaatttcc

SEQ ID NO: 3651 - DNA, 50 bp, synthetic construct
  source 1..50: mol_type = other DNA
cctatatatctcttcatctggctgttcatctgtatcctttatcatatctc

SEQ ID NO: 3652 - DNA, 50 bp, synthetic construct
  source 1..50: mol_type = other DNA
ttattaataaaataaactggtaagtgtgtttttctgaggtctgtgagcca

SEQ ID NO: 3653 - DNA, 50 bp, synthetic construct
  source 1..50: mol_type = other DNA
ttttagcaaattaatcaaatctgaggagagggttttgggaactgcagctt

SEQ ID NO: 3654 - DNA, 50 bp, synthetic construct
  source 1..50: mol_type = other DNA
atagtcagtcagaagtatagatgacaacctactacttgcaattgctgttt

SEQ ID NO: 3655 - DNA, 30 bp, synthetic construct
  source 1..30: mol_type = other DNA
gcagtgaggagcagtcttgtggaactgaac

SEQ ID NO: 3656 - DNA, 50 bp, synthetic construct
  source 1..50: mol_type = other DNA
gttcctgacacagagctcctaaaaccctcggaatttcctgagtgataagg

SEQ ID NO: 3657 - DNA, 50 bp, synthetic construct
  source 1..50: mol_type = other DNA
atgctaggaacatcttttgttctaatattttatttttgaccccagttcct

SEQ ID NO: 3658 - DNA, 50 bp, synthetic construct
  source 1..50: mol_type = other DNA
gatacagagctcctaaatcccttggaatttcctgggtgacaggtgtatct

SEQ ID NO: 3659 - DNA, 33 bp, synthetic construct
  source 1..33: mol_type = other DNA
ttcattctaatgaggtgactcttggtgggcttc

SEQ ID NO: 3660 - DNA, 50 bp, synthetic construct
  source 1..50: mol_type = other DNA
tttcttgggtgacaggaacatcttttttctagcgaggcaagtcttggtgg

SEQ ID NO: 3661 - DNA, 50 bp, synthetic construct
  source 1..50: mol_type = other DNA
gctcctgggtaggctcataaagaatctggttaccagggaaaccaaccatg

SEQ ID NO: 3662 - DNA, 50 bp, synthetic construct
  source 1..50: mol_type = other DNA
gaattagagggttggagctttcagctcacccccctcctcatgacctcctg

SEQ ID NO: 3663 - DNA, 50 bp, synthetic construct
  source 1..50: mol_type = other DNA
agatgggagagaggctgcaggttgagttggtcaccagtggccaatgatgt

SEQ ID NO: 3664 - DNA, 50 bp, synthetic construct
  source 1..50: mol_type = other DNA
aatcaatcatgcctgtgtaatgaaacctccataaaaaccccaaaaaggac

SEQ ID NO: 3665 - DNA, 50 bp, synthetic construct
  source 1..50: mol_type = other DNA
agggtttgggcactttggggcagctgaaagacggaggcttctggagggtg

SEQ ID NO: 3666 - DNA, 50 bp, synthetic construct
  source 1..50: mol_type = other DNA
gtacactgagggaggacatggaagctctgcgcccagtaccctatacctgg

SEQ ID NO: 3667 - DNA, 50 bp, synthetic construct
  source 1..50: mol_type = other DNA
ccctctgactctcttttatctggctgttcatctgtatcctttattaataa

SEQ ID NO: 3668 - DNA, 50 bp, synthetic construct
  source 1..50: mol_type = other DNA
aatagaccagtaagcgtaagtgtttccctgagttctgtgagccctcctag

SEQ ID NO: 3669 - DNA, 50 bp, synthetic construct
  source 1..50: mol_type = other DNA
ctaatgaactgaacctgaggagggagttgtgggaacctcactttatagcc

SEQ ID NO: 3670 - DNA, 50 bp, synthetic construct
  source 1..50: mol_type = other DNA
agttggtcataaagtataggtgacagcctactacttgcaactggcatctg

SEQ ID NO: 3671 - DNA, 50 bp, synthetic construct
  source 1..50: mol_type = other DNA
aagtaggggcagtcttgtgcgacagagctcttaactgatgggatccaaca

SEQ ID NO: 3672 - DNA, 50 bp, synthetic construct
  source 1..50: mol_type = other DNA
ttatctccaggtagatagtgttggaattgaattgaattgaactgcaggac

SEQ ID NO: 3673 - DNA, 10 bp, synthetic construct
  source 1..10: mol_type = other DNA
acccagttag

SEQ ID NO: 3674 - DNA, 50 bp, synthetic construct
  source 1..50: mol_type = other DNA
aatatttggtctttgaccccagttcctgacacagagctcctccatctcat

SEQ ID NO: 3675 - DNA, 50 bp, synthetic construct
  source 1..50: mol_type = other DNA
ggaatttcctgagtgacaggactatctgttgttttaatgaggcaactctt

SEQ ID NO: 3676 - DNA, 50 bp, synthetic construct
  source 1..50: mol_type = other DNA
ggtgggcttctgaatggggctggccaccagaaagaccaagccatggttag

SEQ ID NO: 3677 - DNA, 20 bp, synthetic construct
  source 1..20: mol_type = other DNA
aaggttggagctttcagccg

SEQ ID NO: 3678 - DNA, 50 bp, synthetic construct
  source 1..50: mol_type = other DNA
tccatctggctgttcatttgtatcgccggtgatattcttaataataaatg

SEQ ID NO: 3679 - DNA, 50 bp, synthetic construct
  source 1..50: mol_type = other DNA
agtaagtgtaagtaaagcatttccctgagtgtcctagcaaataaatcaaa

SEQ ID NO: 3680 - DNA, 50 bp, synthetic construct
  source 1..50: mol_type = other DNA
cccaaagagcgggtcttgggaactctagtttatagccagttggtcagaag

SEQ ID NO: 3681 - DNA, 50 bp, synthetic construct
  source 1..50: mol_type = other DNA
cacagatcacaactggggcttgtgactggtatctgaagtcgggggcagcc

SEQ ID NO: 3682 - DNA, 50 bp, synthetic construct
  source 1..50: mol_type = other DNA
acgcgagactgagcccttcaccttaggtcctgatatcatctctaggtaga

SEQ ID NO: 3683 - DNA, 50 bp, synthetic construct
  source 1..50: mol_type = other DNA
tagcatcagaattgaattgaattgtaggacacccagttggtatctgcttg

SEQ ID NO: 3684 - DNA, 50 bp, synthetic construct
  source 1..50: mol_type = other DNA
gagaattgcttggagtgcagagaaaatcccccatacattttggtcacagc

SEQ ID NO: 3685 - DNA, 50 bp, synthetic construct
  source 1..50: mol_type = other DNA
ttggaatttcctgggtgatgggagtcttttgttctaatgaagctcctggg

SEQ ID NO: 3686 - DNA, 50 bp, synthetic construct
  source 1..50: mol_type = other DNA
aggagaatggtcactagaaagaacagattagaagcttgggaatttcagtc

SEQ ID NO: 3687 - DNA, 50 bp, synthetic construct
  source 1..50: mol_type = other DNA
ctacccccatcctctgggaagacctggaggctggagattgagttaatgat

SEQ ID NO: 3688 - DNA, 50 bp, synthetic construct
  source 1..50: mol_type = other DNA
cagtgatgttcaagtaacaaagtcttgtaagaatcccagaactctggggt

SEQ ID NO: 3689 - DNA, 50 bp, synthetic construct
  source 1..50: mol_type = other DNA
ttggggagctccagggctgctgaacatgtggagggtagcccacccggaga

SEQ ID NO: 3690 - DNA, 50 bp, synthetic construct
  source 1..50: mol_type = other DNA
gggcaaggaagcgcacttcccctcccatacacctcgccctgcatatctct

SEQ ID NO: 3691 - DNA, 50 bp, synthetic construct
  source 1..50: mol_type = other DNA
tcatctggctgtcttctgtatcctttattgtattctttattacatagtaa

SEQ ID NO: 3692 - DNA, 50 bp, synthetic construct
  source 1..50: mol_type = other DNA
gctgggaaatgtgtttccctgaggtctgtgagccatcccagcaaattatg

SEQ ID NO: 3693 - DNA, 50 bp, synthetic construct
  source 1..50: mol_type = other DNA
aaatccaaggatggggtcgtaggaaccctggtttacagctggtcagtcag

SEQ ID NO: 3694 - DNA, 50 bp, synthetic construct
  source 1..50: mol_type = other DNA
acatataggtgacaacttggcacttgtatttggtatctgaaatggggggc

SEQ ID NO: 3695 - DNA, 50 bp, synthetic construct
  source 1..50: mol_type = other DNA
agtcttgtgggactgaacccttaacctgaggtctgtgctaactccagtta

SEQ ID NO: 3696 - DNA, 30 bp, synthetic construct
  source 1..30: mol_type = other DNA
gtatcagaattgaattgaattgtgggacac

SEQ ID NO: 3697 - DNA, 50 bp, synthetic construct
  source 1..50: mol_type = other DNA
tccatctggctactccggagttgcatcctttataataaaccagtgacaat

SEQ ID NO: 3698 - DNA, 50 bp, synthetic construct
  source 1..50: mol_type = other DNA
cagtaaactgtttccctgagttccgtgagccgatccacaaaggaatgaac

SEQ ID NO: 3699 - DNA, 50 bp, synthetic construct
  source 1..50: mol_type = other DNA
gcgaggagggggtcatgggaacccccgatttatagccagtcaagcagaag

SEQ ID NO: 3700 - DNA, 50 bp, synthetic construct
  source 1..50: mol_type = other DNA
cacaggaggcccagactgtgactggcatctgaagtgagggacagcttgtg

SEQ ID NO: 3701 - DNA, 50 bp, synthetic construct
  source 1..50: mol_type = other DNA
ggaacgagcccttaacctgtggaatctgatactaactccaggtagatggt

SEQ ID NO: 3702 - DNA, 40 bp, synthetic construct
  source 1..40: mol_type = other DNA
gtcagaattgaattgaattataggcacccagttggtgtgc

SEQ ID NO: 3703 - DNA, 50 bp, synthetic construct
  source 1..50: mol_type = other DNA
agaaagacaaacatcacatgttctcacttatttgtgggatctaaaaatca

SEQ ID NO: 3704 - DNA, 50 bp, synthetic construct
  source 1..50: mol_type = other DNA
aaacaattgaactcatggacatagagagtagaggatgcttaccagaggct

SEQ ID NO: 3705 - DNA, 50 bp, synthetic construct
  source 1..50: mol_type = other DNA
gggaaggatagtagaatgttggtgggaggaagataaggatggttaatgga

SEQ ID NO: 3706 - DNA, 50 bp, synthetic construct
  source 1..50: mol_type = other DNA
taaaaaaaaatagttaaagaatgaataagacctactgtttgatggcacaa

SEQ ID NO: 3707 - DNA, 50 bp, synthetic construct
  source 1..50: mol_type = other DNA
cagggtgactctagtcaataataatttaattgtacatttaaaaacaacta

SEQ ID NO: 3708 - DNA, 50 bp, synthetic construct
  source 1..50: mol_type = other DNA
agagggtataattggattgtttgtgacacaaaggataaatgcttgaggga

SEQ ID NO: 3709 - DNA, 50 bp, synthetic construct
  source 1..50: mol_type = other DNA
atggataccccattctccatgatgtgattattacacattgcatgcctgta

SEQ ID NO: 3710 - DNA, 50 bp, synthetic construct
  source 1..50: mol_type = other DNA
tcatcaaaacatctcatgtaccccataagtatatacacctactatgtacc

SEQ ID NO: 3711 - DNA, 27 bp, synthetic construct
  source 1..27: mol_type = other DNA
cagaaaactttttaaaaatttaaaaaa

SEQ ID NO: 3712 - DNA, 50 bp, synthetic construct; identical to SEQ ID NO: 516
  source 1..50: mol_type = other DNA

SEQ ID NO: 3713 - DNA, 50 bp, synthetic construct
  source 1..50: mol_type = other DNA
ggcgggtggatcatgaggtcaagagatcgagaccatcctggctaacatgg

SEQ ID NO: 3714 - DNA, 50 bp, synthetic construct
  source 1..50: mol_type = other DNA
tgaaaccccgtctctactaaaagtacaaaaaattagccgggtgtggtggc

SEQ ID NO: 3715 - DNA, 50 bp, synthetic construct
  source 1..50: mol_type = other DNA
acgcgcctatagtcccagtactcgggaggctgaggcaggagaatcacttg

SEQ ID NO: 3716 - DNA, 50 bp, synthetic construct
  source 1..50: mol_type = other DNA
aacccaggaggcggaggttgcagtgagccaagatcgcaccactgcactcc

SEQ ID NO: 3717 - DNA, 50 bp, synthetic construct
  source 1..50: mol_type = other DNA
agcctgggcaacagagtgagactctgtctcaaaaaaaaaaaaaaaaaaaa

SEQ ID NO: 3718 - DNA, 50 bp, synthetic construct
  source 1..50: mol_type = other DNA
tatgacaatggtttttggccctccaaagggtcatggtacatgaatagcta

SEQ ID NO: 3719 - DNA, 50 bp, synthetic construct
  source 1..50: mol_type = other DNA
tacatgtatattatagtctgtaatattaaaatttcatgcgggcaattagg

SEQ ID NO: 3720 - skipped

SEQ ID NO: 3721 - DNA, 50 bp, synthetic construct
  source 1..50: mol_type = other DNA
atatacagtatatatatagtgaatctgtggtattaaaatttcatgaagga

SEQ ID NO: 3722 - DNA, 30 bp, synthetic construct
  source 1..30: mol_type = other DNA
gcaattaaggaaaaagaaaatatctaaaaa

SEQ ID NO: 3723 - DNA, 50 bp, synthetic construct
  source 1..50: mol_type = other DNA
ctgtggtattaaaatttcatggtagtgggggagtgattaggaaagaaata

SEQ ID NO: 3724 - DNA, 20 bp, synthetic construct
  source 1..20: mol_type = other DNA
tcttaaaaggctccttagag

SEQ ID NO: 3725 - DNA, 50 bp, synthetic construct
  source 1..50: mol_type = other DNA
atatacagtatgtctatggtattaaaatttaatggtggagggctattagg

SEQ ID NO: 3726 - skipped

SEQ ID NO: 3727 - DNA, 50 bp, synthetic construct
  source 1..50: mol_type = other DNA
agtacataatcggatctatacagtgtatttgtggtattaaaatttcatga

SEQ ID NO: 3728 - DNA, 20 bp, synthetic construct
  source 1..20: mol_type = other DNA
gagttagattaggaaaaatc

SEQ ID NO: 3729 - DNA, 50 bp, synthetic construct; identical to SEQ ID NO: 3568
  source 1..50: mol_type = other DNA

SEQ ID NO: 3730 - DNA, 50 bp, synthetic construct; identical to SEQ ID NO: 3569
  source 1..50: mol_type = other DNA

SEQ ID NO: 3731 - DNA, 50 bp, synthetic construct; identical to SEQ ID NO: 3570
  source 1..50: mol_type = other DNA

SEQ ID NO: 3732 - DNA, 50 bp, synthetic construct; identical to SEQ ID NO: 3571
  source 1..50: mol_type = other DNA

SEQ ID NO: 3733 - DNA, 50 bp, synthetic construct; identical to SEQ ID NO: 3572
  source 1..50: mol_type = other DNA

SEQ ID NO: 3734 - DNA, 50 bp, synthetic construct; identical to SEQ ID NO: 3573
  source 1..50: mol_type = other DNA

SEQ ID NO: 3735 - DNA, 50 bp, synthetic construct; identical to SEQ ID NO: 3574
  source 1..50: mol_type = other DNA

SEQ ID NO: 3736 - DNA, 30 bp, synthetic construct; identical to SEQ ID NO: 3575
  source 1..30: mol_type = other DNA

SEQ ID NO: 3737 - DNA, 50 bp, synthetic construct; identical to SEQ ID NO: 3576
  source 1..50: mol_type = other DNA

SEQ ID NO: 3738 - DNA, 50 bp, synthetic construct; identical to SEQ ID NO: 3577
  source 1..50: mol_type = other DNA

SEQ ID NO: 3739 - DNA, 50 bp, synthetic construct; identical to SEQ ID NO: 3578
  source 1..50: mol_type = other DNA

SEQ ID NO: 3740 - DNA, 50 bp, synthetic construct; identical to SEQ ID NO: 3579
  source 1..50: mol_type = other DNA

SEQ ID NO: 3741 - DNA, 50 bp, synthetic construct; identical to SEQ ID NO: 3580
  source 1..50: mol_type = other DNA

SEQ ID NO: 3742 - DNA, 50 bp, synthetic construct; identical to SEQ ID NO: 3581
  source 1..50: mol_type = other DNA

SEQ ID NO: 3743 - DNA, 50 bp, synthetic construct; identical to SEQ ID NO: 3582
  source 1..50: mol_type = other DNA

SEQ ID NO: 3744 - DNA, 50 bp, synthetic construct; identical to SEQ ID NO: 3583
  source 1..50: mol_type = other DNA

SEQ ID NO: 3745 - DNA, 50 bp, synthetic construct; identical to SEQ ID NO: 3584
  source 1..50: mol_type = other DNA

SEQ ID NO: 3746 - DNA, 50 bp, synthetic construct; identical to SEQ ID NO: 3585
  source 1..50: mol_type = other DNA

SEQ ID NO: 3747 - DNA, 50 bp, synthetic construct; identical to SEQ ID NO: 3586
  source 1..50: mol_type = other DNA

SEQ ID NO: 3748 - DNA, 50 bp, synthetic construct
  source 1..50: mol_type = other DNA
tttcctatgttattacacctacattgaccaggaatctacattttcagcta

SEQ ID NO: 3749 - DNA, 10 bp, synthetic construct
  source 1..10: mol_type = other DNA
actactagtt

SEQ ID NO: 3750 - DNA, 50 bp, synthetic construct; identical to SEQ ID NO: 3588
  source 1..50: mol_type = other DNA

SEQ ID NO: 3751 - DNA, 50 bp, synthetic construct; identical to SEQ ID NO: 3589
  source 1..50: mol_type = other DNA

SEQ ID NO: 3752 - DNA, 50 bp, synthetic construct; identical to SEQ ID NO: 3590
  source 1..50: mol_type = other DNA

SEQ ID NO: 3753 - DNA, 50 bp, synthetic construct; identical to SEQ ID NO: 3591
  source 1..50: mol_type = other DNA

SEQ ID NO: 3754 - DNA, 25 bp, synthetic construct
  source 1..25: mol_type = other DNA
tcatctagccagccagctctctaca

SEQ ID NO: 3755 - DNA, 50 bp, synthetic construct
  source 1..50: mol_type = other DNA
aacttacaaacgcaaggaactctgaaagtgtgcagcaccaccgatcagaa

SEQ ID NO: 3756 - DNA, 50 bp, synthetic construct
  source 1..50: mol_type = other DNA
gagaaaaccaagggacccgaaatatgctttaattaaattttcttttaaaa

SEQ ID NO: 3757 - DNA, 50 bp, synthetic construct
  source 1..50: mol_type = other DNA
tgtcactggaaagaacatcttgggaagacggcctggccgatcgccgtgtg

SEQ ID NO: 3758 - DNA, 50 bp, synthetic construct
  source 1..50: mol_type = other DNA
aagggcaagccactctggccgagagggagccccacacctcggtctcccca

SEQ ID NO: 3759 - DNA, 50 bp, synthetic construct
  source 1..50: mol_type = other DNA
gaccggccctggccgggggcatccccctaaacttcggatccctcctcgga

SEQ ID NO: 3760 - DNA, 50 bp, synthetic construct
  source 1..50: mol_type = other DNA
aatgggaccctctctgggccgcctcccagcggtggtggcgaggagcaaac

SEQ ID NO: 3761 - skipped

SEQ ID NO: 3762 - DNA, 50 bp, synthetic construct
  source 1..50: mol_type = other DNA
gggagccccagagggtgccacacccctaaacggaaaatccctcgattgac

SEQ ID NO: 3763 - DNA, 40 bp, synthetic construct
  source 1..40: mol_type = other DNA
attaggatgctggctgtgtcacctcggtctccccaagatt

SEQ ID NO: 3764 - DNA, 24 bp, synthetic construct
  source 1..24: mol_type = other DNA
atgctttaattaaattttattttg

SEQ ID NO: 3765 - DNA, 20 bp, synthetic construct
  source 1..20: mol_type = other DNA
gaagagaaaaccaagggacc

SEQ ID NO: 3766 - skipped

SEQ ID NO: 3767 - DNA, 24 bp, synthetic construct
  source 1..24: mol_type = other DNA
atgctttaattaaatttcctttgc

SEQ ID NO: 3768 - DNA, 50 bp, synthetic construct
  source 1..50: mol_type = other DNA
ttgaacatccctaacttgaaaatctgaattttgaagtgctccaaaatcca

SEQ ID NO: 3769 - DNA, 50 bp, synthetic construct
  source 1..50: mol_type = other DNA
aaactttttgagcattgttatgataccacaaatgaaaaatcctacatgga

SEQ ID NO: 3770 - DNA, 50 bp, synthetic construct
  source 1..50: mol_type = other DNA
agtacttaccacaaactttgcttcatgccccaaattattttaaatattgt

SEQ ID NO: 3771 - DNA, 50 bp, synthetic construct
  source 1..50: mol_type = other DNA
ataaaattatcttcaggctataaggtgtatatgaaacaaaaaatgaattt

SEQ ID NO: 3772 - DNA, 50 bp, synthetic construct
  source 1..50: mol_type = other DNA
cctatttagacttgggtcccatggccgagatatctcattataatgcaaat

SEQ ID NO: 3773 - DNA, 50 bp, synthetic construct
  source 1..50: mol_type = other DNA
attccaaaatcagaaaaaaaaaaatccaaaatctaaaacactttcagtat

SEQ ID NO: 3774 - DNA, 27 bp, synthetic construct
  source 1..27: mol_type = other DNA
taagcatttcaggtcatggatactgaa

SEQ ID NO: 3775 - DNA, 50 bp, synthetic construct
  source 1..50: mol_type = other DNA
aaactagattagattcttgattgtatgttcttatagtattctgcatactt

SEQ ID NO: 3776 - DNA, 50 bp, synthetic construct
  source 1..50: mol_type = other DNA
tgttagcacattacaatgatagttcattatttgtgccctcatttgttatt

SEQ ID NO: 3777 - DNA, 50 bp, synthetic construct
  source 1..50: mol_type = other DNA
tctctgtatcacccaccagaacataagttctgcaaaggcagggactgtgt

SEQ ID NO: 3778 - DNA, 50 bp, synthetic construct
  source 1..50: mol_type = other DNA
ctgtttgttcacccctgtatcactagtgcatagttggtgctcagtgggtg

SEQ ID NO: 3779 - DNA, 18 bp, synthetic construct
  source 1..18: mol_type = other DNA
ttggttaaatgaatgaat

SEQ ID NO: 3780 - DNA, 50 bp, synthetic construct
  source 1..50: mol_type = other DNA
gatactgtgcataaaacactttcaatagtgtctgtcagacagcagatgcg

SEQ ID NO: 3781 - DNA, 17 bp, synthetic construct
  source 1..17: mol_type = other DNA
caataaatgttgacttt

SEQ ID NO: 3782 - DNA, 50 bp, synthetic construct
  source 1..50: mol_type = other DNA
ggatgtaaaaagaaatggactctaagaaacttgttactgtagttgttgaa

SEQ ID NO: 3783 - DNA, 50 bp, synthetic construct
  source 1..50: mol_type = other DNA
agaatattgtcaaagtgtttatccatattaagtggctccatagaacgtag

SEQ ID NO: 3784 - DNA, 50 bp, synthetic construct
  source 1..50: mol_type = other DNA
ttcctttagattttagtgttagcttctataaaactgctggtttgttttaa

SEQ ID NO: 3785 - DNA, 50 bp, synthetic construct
  source 1..50: mol_type = other DNA
tcttttggaaaccataggtgtttttttttaataccagtgatcatattttc

SEQ ID NO: 3786 - DNA, 39 bp, synthetic construct
  source 1..39: mol_type = other DNA
ctttgtgcttttgttggtaggaagctcagagcccaattt

SEQ ID NO: 3787 - DNA, 50 bp, synthetic construct
  source 1..50: mol_type = other DNA
agtgctgtttccatcagctactagctgagacacttgggcaaatgagggtg

SEQ ID NO: 3788 - DNA, 50 bp, synthetic construct
  source 1..50: mol_type = other DNA
atctccagtcctcagtatccttgctgttaatgagagatggtcatttcttc

SEQ ID NO: 3789 - DNA, 17 bp, synthetic construct
  source 1..17: mol_type = other DNA
tctgcctagctcaaaag

SEQ ID NO: 3790 - DNA, 50 bp, synthetic construct
  source 1..50: mol_type = other DNA
gacggcagggtttttatttgtgttgtttatgtggtctgctgaacacctag

SEQ ID NO: 3791 - DNA, 50 bp, synthetic construct
  source 1..50: mol_type = other DNA
aacagtccctgatgtgtaggtagctcaaacaatatttattgaatgaatgg

SEQ ID NO: 3792 - skipped

SEQ ID NO: 3793 - DNA, 50 bp, synthetic construct
  source 1..50: mol_type = other DNA
cattctctttcttcctgtctcttgcacagaactcgccattccttctctgt

SEQ ID NO: 3794 - DNA, 50 bp, synthetic construct
  source 1..50: mol_type = other DNA
ttccattcagcctcctttgctggttcctcatctcccctacatcataatgc

SEQ ID NO: 3795 - DNA, 50 bp, synthetic construct
  source 1..50: mol_type = other DNA
tggagtgccttagggctaagtccttgggtctcttctcttacctgcaaata

SEQ ID NO: 3796 - DNA, 50 bp, synthetic construct
  source 1..50: mol_type = other DNA
ctcttaccttggttggtttgtttaacccaatggctttaaatcaaatttct

SEQ ID NO: 3797 - DNA, 50 bp, synthetic construct
  source 1..50: mol_type = other DNA
acactgaagaccgaaatttatgtcagcaacttggatgtctcttccgaact

SEQ ID NO: 3798 - DNA, 50 bp, synthetic construct
  source 1..50: mol_type = other DNA
ccagactcacatacgcaacagcctactcatcatgtccaggtggatattta

SEQ ID NO: 3799 - DNA, 50 bp, synthetic construct
  source 1..50: mol_type = other DNA
gtaggcatctcaaagttattcaaaactgaacttctggtccctactcataa

SEQ ID NO: 3800 - DNA, 50 bp, synthetic construct
  source 1..50: mol_type = other DNA
caaacaactgtgtttttcctgcagccttctcctattcactttagagcaat

SEQ ID NO: 3801 - DNA, 50 bp, synthetic construct
  source 1..50: mol_type = other DNA
tccaactctatcctttcaattgcttaggacttcgaaagtctaggaatcat

SEQ ID NO: 3802 - DNA, 50 bp, synthetic construct
  source 1..50: mol_type = other DNA
cctgagtcctcatgttctcgcacacctcatatccaggccattgatccaat

SEQ ID NO: 3803 - DNA, 50 bp, synthetic construct
  source 1..50: mol_type = other DNA
cctgtgatttctagcttcaagatatatccatctctatcctatatttgctt

SEQ ID NO: 3804 - DNA, 50 bp, synthetic construct
  source 1..50: mol_type = other DNA
ggctgctagcagcatgaccccagccactgtcatctcttgcctgggttagc

SEQ ID NO: 3805 - DNA, 50 bp, synthetic construct
  source 1..50: mol_type = other DNA
aacagcctcttttagtcctggccctgttcctgcccttgccctggaatgcg

SEQ ID NO: 3806 - DNA, 50 bp, synthetic construct
  source 1..50: mol_type = other DNA
ctcttctccacccagcagccaatggggtcatgtgaaaatgcatccccagt

SEQ ID NO: 3807 - DNA, 50 bp, synthetic construct
  source 1..50: mol_type = other DNA
agaaaagaaaaaccttttcacctcactcacacttaaagccacagtcctta

SEQ ID NO: 3808 - DNA, 50 bp, synthetic construct
  source 1..50: mol_type = other DNA
caacggccttcccagccctacaagatctggaccccagcctctctgagcct

SEQ ID NO: 3809 - DNA, 50 bp, synthetic construct
  source 1..50: mol_type = other DNA
cctcctcactcatcatgcttcagccactgtcctctccctggcctctccca

SEQ ID NO: 3810 - DNA, 50 bp, synthetic construct
  source 1..50: mol_type = other DNA
gccacatgcctctccccaggcagggtcactctgtttgcacacatccctca

SEQ ID NO: 3811 - DNA, 50 bp, synthetic construct
  source 1..50: mol_type = other DNA
gctgcccttactccttatctctttcaggtttttgctcaagccttctctca

SEQ ID NO: 3812 - DNA, 50 bp, synthetic construct
  source 1..50: mol_type = other DNA
tcagagactcttctggtcaaatatctgatcatcctactgaaaattaaggc

SEQ ID NO: 3813 - DNA, 50 bp, synthetic construct
  source 1..50: mol_type = other DNA
tccttttctagccccaccctgtctatccccgttcttgttttatttttctc

SEQ ID NO: 3814 - DNA, 50 bp, synthetic construct
  source 1..50: mol_type = other DNA
tgtagcacttattaccatttcagataccatatattattatacttatttgt

SEQ ID NO: 3815 - DNA, 50 bp, synthetic construct
  source 1..50: mol_type = other DNA
tgtctatctccaccctcttcttccagagtataaactccatgtggctaggg

SEQ ID NO: 3816 - DNA, 50 bp, synthetic construct
  source 1..50: mol_type = other DNA
ttgagcatccctaatccaaaaatccaaaatctgaaatactccaaaatcca

SEQ ID NO: 3817 - DNA, 50 bp, synthetic construct
  source 1..50: mol_type = other DNA
aaactttagagcaccaacatgatgccttaagtggaaaattccacatatta

SEQ ID NO: 3818 - DNA, 50 bp, synthetic construct
  source 1..50: mol_type = other DNA
gtgcttaacacaaactttgttttatgcagaaaattatttaaaatattata

SEQ ID NO: 3819 - DNA, 50 bp, synthetic construct
  source 1..50: mol_type = other DNA
tgaaattaacctcaggctatggtataaggtgtatatgaaacatgaatgaa

SEQ ID NO: 3820 - DNA, 50 bp, synthetic construct
  source 1..50: mol_type = other DNA
tttcgtgtttagatttgggtcacatccccaatatatctcattatgtatat

SEQ ID NO: 3821 - DNA, 20 bp, synthetic construct
  source 1..20: mol_type = other DNA
gcaaatattccaaaatatgc

SEQ ID NO: 3822 - DNA, 50 bp, synthetic construct
  source 1..50: mol_type = other DNA
ttctgcaaaggcctcctaaccagtcatcctacatccactcttactaccta

SEQ ID NO: 3823 - DNA, 50 bp, synthetic construct
  source 1..50: mol_type = other DNA
tatagattcttcccttctaacaatctatttaaaattccagtctggtcatg

SEQ ID NO: 3824 - DNA, 50 bp, synthetic construct
  source 1..50: mol_type = other DNA
acactgccctgctgttgatgaccataagtagcttgcaggattttcaggag

SEQ ID NO: 3825 - DNA, 50 bp, synthetic construct
  source 1..50: mol_type = other DNA
gcagcccttcctggctttctggaggcctttttcatcctctttcccttgtt

SEQ ID NO: 3826 - DNA, 50 bp, synthetic construct
  source 1..50: mol_type = other DNA
cactgtactatagtgcttcctctccaaactccctcacatgccagaacttt

SEQ ID NO: 3827 - DNA, 50 bp, synthetic construct
  source 1..50: mol_type = other DNA
gcacatgcagggcctctatcatgaatgctctcttacttatagtggaattt

SEQ ID NO: 3828 - DNA, 50 bp, synthetic construct
  source 1..50: mol_type = other DNA
gttcatatacttaccattcagatcttaaagttcacctcctcagggaagcc

SEQ ID NO: 3829 - DNA, 50 bp, synthetic construct
  source 1..50: mol_type = other DNA
ttctgtgactccctagctaaattggatggcactattacaagcctttggac

SEQ ID NO: 3830 - DNA, 23 bp, synthetic construct
  source 1..23: mol_type = other DNA
cctcagggactgtgtctgtttgg

SEQ ID NO: 3831 - DNA, 50 bp, synthetic construct
  source 1..50: mol_type = other DNA
agtgtctgtcagacagcagacacagaactgtgcaatgatcagatccaggg

SEQ ID NO: 3832 - DNA, 50 bp, synthetic construct
  source 1..50: mol_type = other DNA
atattttcctttgtgctttttgaattctgaaccaagctgaaattattacc

SEQ ID NO: 3833 - DNA, 50 bp, synthetic construct
  source 1..50: mol_type = other DNA
tcttttctgcctagctcaaaagtttttatttcaagtattttctcactaaa

SEQ ID NO: 3834 - DNA, 50 bp, synthetic construct
  source 1..50: mol_type = other DNA
aatatttattgaatgaatggatattattgaaaagcccttacttagacaaa

SEQ ID NO: 3835 - DNA, 50 bp, synthetic construct
  source 1..50: mol_type = other DNA
gaactccagactcacatatactacatcctactccacatgtccatttggat

SEQ ID NO: 3836 - DNA, 50 bp, synthetic construct
  source 1..50: mol_type = other DNA
gtatctcataggcatctcaaacttacacccacatagaccacttgatttcc

SEQ ID NO: 3837 - DNA, 50 bp, synthetic construct
  source 1..50: mol_type = other DNA
gctgggcgcggtggctcacgcctgtaatactagcactttgggaggtcgag

SEQ ID NO: 3838 - DNA, 50 bp, synthetic construct
  source 1..50: mol_type = other DNA
gcaggaggatcgcttgagtccaggagacagagaccagcctggccaacatc

SEQ ID NO: 3839 - DNA, 50 bp, synthetic construct
  source 1..50: mol_type = other DNA
gtgagatcccatctctacaaaaaatagttagctgggtgtggtggtgcaca

SEQ ID NO: 3840 - DNA, 50 bp, synthetic construct
  source 1..50: mol_type = other DNA
cctgtagtcccagctacttgggaggctgaagcaggaggatcgcttgaggc

SEQ ID NO: 3841 - DNA, 50 bp, synthetic construct
  source 1..50: mol_type = other DNA
cagcaggttgaggctgcagtgagctatgactgcactactgcactccagcc

SEQ ID NO: 3842 - DNA, 24 bp, synthetic construct
  source 1..24: mol_type = other DNA
tgggggacagagcaagaccatgtc

SEQ ID NO: 3843 - DNA, 50 bp, synthetic construct
  source 1..50: mol_type = other DNA
gctgggcgcggtggctcacgcttgtaatcctagcactttgggaggtcgag

SEQ ID NO: 3844 - DNA, 50 bp, synthetic construct
  source 1..50: mol_type = other DNA
gcaggaggatcacttgaggtcaggagttcgaaatcagcctggccaacatg

SEQ ID NO: 3845 - DNA, 50 bp, synthetic construct
  source 1..50: mol_type = other DNA
gtgaaaccccatctctacaaaaaaaaacaaaaaattagctgggtgtggtg

SEQ ID NO: 3846 - DNA, 50 bp, synthetic construct
  source 1..50: mol_type = other DNA
gaaggcacctgtaatttctgctactcaggaggctgagacaggagaattgc

SEQ ID NO: 3847 - DNA, 50 bp, synthetic construct
  source 1..50: mol_type = other DNA
ttgaacccgggaggcagaggttgcagtgagctgagatcatgccactgcac

SEQ ID NO: 3848 - DNA, 30 bp, synthetic construct
  source 1..30: mol_type = other DNA
tccagcctgggtgacagagcaagactctgt

SEQ ID NO: 3849 - DNA, 50 bp, synthetic construct
  source 1..50: mol_type = other DNA
gctgggcgcggtggctcacgcctgtaaacccagcactttgggaggtcgag

SEQ ID NO: 3850 - DNA, 50 bp, synthetic construct
  source 1..50: mol_type = other DNA
gcgggtggatcacctgaggtcggaagttcgagaccagcctggtcaacatg

SEQ ID NO: 3851 - DNA, 50 bp, synthetic construct
  source 1..50: mol_type = other DNA
gtgaaaccccccatctctactaaagtaaatacaaaaattagctagcatgg

SEQ ID NO: 3852 - DNA, 50 bp, synthetic construct
  source 1..50: mol_type = other DNA
tggtgcacacctgtagtcccagctactcgggaggctgaggcaggataatc

SEQ ID NO: 3853 - DNA, 50 bp, synthetic construct
  source 1..50: mol_type = other DNA
gcttgaacccaggaggtggaggttgcattgagccaagatcgcgccactgt

SEQ ID NO: 3854 - DNA, 22 bp, synthetic construct
  source 1..22: mol_type = other DNA
actccagcctgggtgacagagt

SEQ ID NO: 3855 - DNA, 50 bp, synthetic construct
  source 1..50: mol_type = other DNA
gccgggcacggtggctcacgcctgtaatcccagcactttgggaggccgag

SEQ ID NO: 3856 - DNA, 50 bp, synthetic construct
  source 1..50: mol_type = other DNA
gcgggtggatcacaaggtcaggagatcgagaccatcctggctaacacggt

SEQ ID NO: 3857 - DNA, 50 bp, synthetic construct
  source 1..50: mol_type = other DNA
gaaaccctgtctctactaaaaatacaaaaaattagccaggtgtggtggtg

SEQ ID NO: 3858 - DNA, 50 bp, synthetic construct
  source 1..50: mol_type = other DNA
ggcgcctgtagtcccagctactcaggaggctgaggcaggagaatggagtg

SEQ ID NO: 3859 - DNA, 50 bp, synthetic construct
  source 1..50: mol_type = other DNA
aacccaggaggtggagcttgcagtgagccgagatcgcgccactgcactcc

SEQ ID NO: 3860 - DNA, 50 bp, synthetic construct
  source 1..50: mol_type = other DNA
agcctgggcgacagagcgagactccatctcaaaaaaaaaaaaaaaaaaag

SEQ ID NO: 3861 - DNA, 50 bp, synthetic construct
  source 1..50: mol_type = other DNA
attcagagtctctgctaaatttcccatgtgttcattcattaagaccacta

SEQ ID NO: 3862 - DNA, 50 bp, synthetic construct
  source 1..50: mol_type = other DNA
ctaggctgggtgtggtagttcatgcctgtaatcccagcactttgggaggc

SEQ ID NO: 3863 - DNA, 50 bp, synthetic construct
  source 1..50: mol_type = other DNA
cgaggcgggcggatcacctgaggtcaggagtttgagaccagcctggccaa

SEQ ID NO: 3864 - DNA, 50 bp, synthetic construct
  source 1..50: mol_type = other DNA
caatggtgaaacaccatttctattaaaaatacaaaaattagctgggtgtg

SEQ ID NO: 3865 - DNA, 50 bp, synthetic construct
  source 1..50: mol_type = other DNA
gtggtgcacacctataatcccagctacttgggaggctgaagcaggaaaat

SEQ ID NO: 3866 - DNA, 50 bp, synthetic construct
  source 1..50: mol_type = other DNA
tgtttgaacctgcgaggtggaggttgaagtgagccaagatctcaccactg

SEQ ID NO: 3867 - DNA, 21 bp, synthetic construct
  source 1..21: mol_type = other DNA
cactccagcctgggggacaga

SEQ ID NO: 3868 - DNA, 50 bp, synthetic construct
  source 1..50: mol_type = other DNA
cggtggctcacgcctgtaatcacagcactttgggaggccgaggcaggtgg

SEQ ID NO: 3869 - DNA, 50 bp, synthetic construct
  source 1..50: mol_type = other DNA
atcacctgaggtcaggagtttgagaccagcctggccaacatggtgaaacc

SEQ ID NO: 3870 - DNA, 50 bp, synthetic construct
  source 1..50: mol_type = other DNA
ctgcctctattaaaaatacaaaaaatagccaagtgtggtggtgcacacct

SEQ ID NO: 3871 - DNA, 50 bp, synthetic construct
  source 1..50: mol_type = other DNA
gtaatcccagctactagggagactaaggtaggagaatcccttgaacctgg

SEQ ID NO: 3872 - DNA, 50 bp, synthetic construct
  source 1..50: mol_type = other DNA
gaggcagaggttgcagtgagcccaggtcatgccactgcactccagcctgg

SEQ ID NO: 3873 - DNA, 20 bp, synthetic construct
  source 1..20: mol_type = other DNA
gggacagagcaagactccat

SEQ ID NO: 3874 - DNA, 50 bp, synthetic construct
  source 1..50: mol_type = other DNA
gctgggcgcagtggctcaggcctgtaatcccagtactttgggaggtcgag

SEQ ID NO: 3875 - DNA, 50 bp, synthetic construct
  source 1..50: mol_type = other DNA
gccagtggatcacgaggtcaggggtttgagaccatcctggccaatgtagt

SEQ ID NO: 3876 - DNA, 50 bp, synthetic construct
  source 1..50: mol_type = other DNA
gaaaccccatctctactaaaaatacaaaaattagctgggcatggtggcac

SEQ ID NO: 3877 - DNA, 50 bp, synthetic construct
  source 1..50: mol_type = other DNA
acacctgtagtaccagctacttggaggctgaggcaggagaatcacttgaa

SEQ ID NO: 3878 - DNA, 50 bp, synthetic construct
  source 1..50: mol_type = other DNA
cctgggaggcagaggttgcaatgagccaagattgcactactgcactccag

SEQ ID NO: 3879 - DNA, 22 bp, synthetic construct
  source 1..22: mol_type = other DNA
cttgggcaacagagcaagactt

SEQ ID NO: 3880 - DNA, 50 bp, synthetic construct
  source 1..50: mol_type = other DNA
cctgtaattctagcactttgggaggtcgaggcaggaggatcacttgaggc

SEQ ID NO: 3881 - DNA, 50 bp, synthetic construct
  source 1..50: mol_type = other DNA
aaggagtttgagaccagcctgggcaacatagtgagacactatctctacaa

SEQ ID NO: 3882 - DNA, 50 bp, synthetic construct
  source 1..50: mol_type = other DNA
aaaattaaattagctgagcatggtggtgcacacctgtggtcccagatact

SEQ ID NO: 3883 - DNA, 50 bp, synthetic construct
  source 1..50: mol_type = other DNA
caggaggctgagattggtggatcacttgagactaggaagttgaggctgcc

SEQ ID NO: 3884 - DNA, 40 bp, synthetic construct
  source 1..40: mol_type = other DNA
atgagccatgactgcaccactgcactccagcttgggcagc

SEQ ID NO: 3885 - DNA, 50 bp, synthetic construct
  source 1..50: mol_type = other DNA
ctctagcccgaatctaccatgaactctctatgtgagtatccgtctgccca

SEQ ID NO: 3886 - DNA, 50 bp, synthetic construct
  source 1..50: mol_type = other DNA
ttggacatctccactgggaagctcaccggacatagcaaactcaacacaca

SEQ ID NO: 3887 - DNA, 50 bp, synthetic construct
  source 1..50: mol_type = other DNA
tccccaactatgcataccacctgcatactaccaccctccaaacctgcttc

SEQ ID NO: 3888 - DNA, 50 bp, synthetic construct
  source 1..50: mol_type = other DNA
tccaggcttctcactcagtgaggggctcaccatccaccaacttgcccaag

SEQ ID NO: 3889 - DNA, 50 bp, synthetic construct
  source 1..50: mol_type = other DNA
caaaataaattgggtgtaatctttgacacccccttcacccaacttctccc

SEQ ID NO: 3890 - DNA, 50 bp, synthetic construct
  source 1..50: mol_type = other DNA
acgtatttatttaccagttcctgtggatgttaccttctaaatggctccaa

SEQ ID NO: 3891 - DNA, 50 bp, synthetic construct
  source 1..50: mol_type = other DNA
aatctacccaagtcactctgcactaccactactgccaccatgccaatcca

SEQ ID NO: 3892 - DNA, 50 bp, synthetic construct
  source 1..50: mol_type = other DNA
agatgccaatatcatcccttgctcggacaacagctcctgcctcctcactg

SEQ ID NO: 3893 - DNA, 13 bp, synthetic construct
  source 1..13: mol_type = other DNA
gtcgccattctcc

SEQ ID NO: 3894 - DNA, 50 bp, synthetic construct
  source 1..50: mol_type = other DNA
agaatgcctttaatgaagcagtaaatactaattttattaaatctcaaccc

SEQ ID NO: 3895 - DNA, 50 bp, synthetic construct
  source 1..50: mol_type = other DNA
ttgagtacggtgtgtcatgaaatgagaagtagcacacagtactatatgct

SEQ ID NO: 3896 - DNA, 50 bp, synthetic construct
  source 1..50: mol_type = other DNA
acagatgaagtacaatgctgtcaaataggggtacttgtgttaattgttgg

SEQ ID NO: 3897 - DNA, 18 bp, synthetic construct
  source 1..18: mol_type = other DNA
agtcgcaagctgaactag

SEQ ID NO: 3898 - DNA, 20 bp, synthetic construct
  source 1..20: mol_type = other DNA
acctgcatactaccaccctc

SEQ ID NO: 3899 - DNA, 32 bp, synthetic construct
  source 1..32: mol_type = other DNA
cttctccaggcttctcagtggacagtgagggg

SEQ ID NO: 3900 - DNA, 50 bp, synthetic construct
  source 1..50: mol_type = other DNA
aaacctgttttctccaggctcctgccatccgaccaaatccttcctctctc

SEQ ID NO: 3901 - DNA, 50 bp, synthetic construct
  source 1..50: mol_type = other DNA
tgtccttcctgatgctgtcacccatctaagtccaggcccctccccctatt

SEQ ID NO: 3902 - DNA, 50 bp, synthetic construct
  source 1..50: mol_type = other DNA
cagggatggccctgtcctcttctattctcaacctcagctccccccatccc

SEQ ID NO: 3903 - DNA, 50 bp, synthetic construct
  source 1..50: mol_type = other DNA
ctttgagtctgtgtgcaggactgtccttgctatccctgtgtgtgtctcag

SEQ ID NO: 3904 - DNA, 50 bp, synthetic construct
  source 1..50: mol_type = other DNA
accctcgacctctaccaccgcggtgctcttcttcctgctccactttcacc

SEQ ID NO: 3905 - DNA, 50 bp, synthetic construct
  source 1..50: mol_type = other DNA
agggatcccctggatgctgccattacctggaactgcatctcacctttatt

SEQ ID NO: 3906 - DNA, 36 bp, synthetic construct
  source 1..36: mol_type = other DNA
ccgggttataaacttcagggtctcactcagtgaggg

SEQ ID NO: 3907 - DNA, 20 bp, synthetic construct
  source 1..20: mol_type = other DNA
cctgcttctccaggcttctc

SEQ ID NO: 3908 - skipped

SEQ ID NO: 3909 - DNA, 50 bp, synthetic construct
  source 1..50: mol_type = other DNA
tggctcatgcctgcaatcccagcattttgagaagccgaggcaggaggatc

SEQ ID NO: 3910 - DNA, 50 bp, synthetic construct
  source 1..50: mol_type = other DNA
acttgagcccaagaggttgaggctgcagtgaaccgtaattgcaccactgc

SEQ ID NO: 3911 - DNA, 34 bp, synthetic construct
  source 1..34: mol_type = other DNA
actccagcctgagtgacagagtgagaccctgtct

SEQ ID NO: 3912 - DNA, 27 bp, synthetic construct
  source 1..27: mol_type = other DNA
gaggtgggaggattgcttgagcccaga

SEQ ID NO: 3913 - DNA, 50 bp, synthetic construct
  source 1..50: mol_type = other DNA
ggttgaggctgcagtgaaccaggatcacaccactgcactctagcctgagt

SEQ ID NO: 3914 - DNA, 12 bp, synthetic construct
  source 1..12: mol_type = other DNA
gacagagcgaga

SEQ ID NO: 3915 - DNA, 50 bp, synthetic construct
  source 1..50: mol_type = other DNA
agaatgtccttaatgaagcaataaaaatgactaattttattaaatctcaa

SEQ ID NO: 3916 - DNA, 10 bp, synthetic construct
  source 1..10: mol_type = other DNA
gccttgagta

SEQ ID NO: 3917 - DNA, 30 bp, synthetic construct
  source 1..30: mol_type = other DNA
acacttgtgtggttgtttgagttgcaagct

SEQ ID NO: 3918 - DNA, 10 bp, synthetic construct
  source 1..10: mol_type = other DNA
gaactagcta

SEQ ID NO: 3919 - DNA, 50 bp, synthetic construct
  source 1..50: mol_type = other DNA
ttgtcttgaaattatctatttgtacgtttactctagcagatgagttccag

SEQ ID NO: 3920 - DNA, 45 bp, synthetic construct
  source 1..45: mol_type = other DNA
gggatacggatgggtccctaatcacttctgaattcctgacccctg

SEQ ID NO: 3921 - DNA, 50 bp, synthetic construct
  source 1..50: mol_type = other DNA
tgtatatttttttacagcctgtctctgtcaactgcaatgtcaactccagg

SEQ ID NO: 3922 - skipped

SEQ ID NO: 3923 - DNA, 50 bp, synthetic construct
  source 1..50: mol_type = other DNA
ggccgggcatagtggctcatgcttataatcctagcacttcgggaggccaa

SEQ ID NO: 3924 - DNA, 50 bp, synthetic construct
  source 1..50: mol_type = other DNA
ggcaggaagatctcttgagcctaggaattcaagactagccaaggcaacat

SEQ ID NO: 3925 - DNA, 50 bp, synthetic construct
  source 1..50: mol_type = other DNA
agtgagaccccatgtctacaaaaaataagaaattagctgggtatggtggc

SEQ ID NO: 3926 - DNA, 50 bp, synthetic construct
  source 1..50: mol_type = other DNA
atgcgcctatagtcccagggaggctgaggtgggaggatcgcctgagccca

SEQ ID NO: 3927 - DNA, 50 bp, synthetic construct
  source 1..50: mol_type = other DNA
ggaggtcactgctgcggcaagctatgattgcaccactgcacttgggtggc

SEQ ID NO: 3928 - DNA, 11 bp, synthetic construct
  source 1..11: mol_type = other DNA
agggcgatacc

SEQ ID NO: 3929 - DNA, 50 bp, synthetic construct
  source 1..50: mol_type = other DNA
ggccgggtgcggtggctcaagcctgtaatcccagcactttgggaggccaa

SEQ ID NO: 3930 - DNA, 50 bp, synthetic construct
  source 1..50: mol_type = other DNA
gacaggcagatcacaaggtcaggagattgagaccatcctggctaacacgg

SEQ ID NO: 3931 - DNA, 50 bp, synthetic construct
  source 1..50: mol_type = other DNA
tgaaaccctgtctctactaaaaaatacaaaaaattagccaggcgtggtgg

SEQ ID NO: 3932 - DNA, 50 bp, synthetic construct
  source 1..50: mol_type = other DNA
caggcacctgtagtcccagctattcgggaagctgaggcaggagaatggca

SEQ ID NO: 3933 - DNA, 50 bp, synthetic construct
  source 1..50: mol_type = other DNA
tgaacccggaaggtggaggttgcagtgagctgagatcgcgccactgcact

SEQ ID NO: 3934 - DNA, 50 bp, synthetic construct
  source 1..50: mol_type = other DNA
ccagtctggggacagagcaagactctttcttaaaaaaaaaaaaaaaaaaa

SEQ ID NO: 3935 - skipped

SEQ ID NO: 3936 - DNA, 45 bp, synthetic construct
  source 1..45: mol_type = other DNA
cgacactgtgtctcttaaaaataaataaatacacagataaataaa

SEQ ID NO: 3937 - DNA, 50 bp, synthetic construct
  source 1..50: mol_type = other DNA
agatcatcgctccatgcctaaccctctccagtggcttcctactgtgctgc

SEQ ID NO: 3938 - DNA, 50 bp, synthetic construct
  source 1..50: mol_type = other DNA
aacgaaccctgtcccttcactcagctgacaagcacctccgtgcccctgcc

SEQ ID NO: 3939 - DNA, 50 bp, synthetic construct
  source 1..50: mol_type = other DNA
cctgccagcctccctgtgggctccctgcttacagccaccggggctccttt

SEQ ID NO: 3940 - DNA, 50 bp, synthetic construct
  source 1..50: mol_type = other DNA
tccactctctaaacacaggacactcattcccacctcaaggcctttgcact

SEQ ID NO: 3941 - DNA, 50 bp, synthetic construct
  source 1..50: mol_type = other DNA
tgtttggtcggcttggaatgttcttttcctacttctctcctccttctcac

SEQ ID NO: 3942 - DNA, 50 bp, synthetic construct
  source 1..50: mol_type = other DNA
cattcaagtcttagctgagggaggccttccctgacctcccaatctaaagt

SEQ ID NO: 3943 - DNA, 50 bp, synthetic construct
  source 1..50: mol_type = other DNA
catcacacaccagctcccctaactcccccaccccaggttatccttctatc

SEQ ID NO: 3944 - DNA, 50 bp, synthetic construct
  source 1..50: mol_type = other DNA
ctatgacctcgttttattttcaggactgaaactgttactctgacagcacc

SEQ ID NO: 3945 - skipped

SEQ ID NO: 3946 - DNA, 50 bp, synthetic construct
  source 1..50: mol_type = other DNA
cactgactccactgtggcctgaatgtcatgtcccctcctgggactcagtt

SEQ ID NO: 3947 - DNA, 50 bp, synthetic construct
  source 1..50: mol_type = other DNA
tcccagtggtaaagtgggagagtactgaatgggcaccaagattccagctt

SEQ ID NO: 3948 - skipped

SEQ ID NO: 3949 - DNA, 40 bp, synthetic construct
  source 1..40: mol_type = other DNA
cctgggactataggcgcatgccaccatacccagctaattt

SEQ ID NO: 3950 - DNA, 23 bp, synthetic construct
  source 1..23: mol_type = other DNA
ggtggcatgcgcctatagtccca

SEQ ID NO: 3951 - DNA, 53 bp, synthetic construct
  source 1..53: mol_type = other DNA
caaaaaataagaaattagctgggtatggtggcatgcgcctatagtcccaggga

SEQ ID NO: 3952 - DNA, 49 bp, synthetic construct
  source 1..49: mol_type = other DNA
caaaaaataagaaattagctgggtatggtggcatgcgcctatagtccca

SEQ ID NO: 3953 - DNA, 20 bp, synthetic construct
  source 1..20: mol_type = other DNA
cacttctgaattcctgaccc

SEQ ID NO: 3954 - DNA, 20 bp, synthetic construct
  source 1..20: mol_type = other DNA
tcttgaaattatctatttgt

SEQ ID NO: 3955 - DNA, 20 bp, synthetic construct
  source 1..20: mol_type = other DNA
cacttctgaattcctgaccc

SEQ ID NO: 3956 - DNA, 20 bp, synthetic construct
  source 1..20: mol_type = other DNA
cttgaaattatctatttgta

SEQ ID NO: 3957 - DNA, 20 bp, synthetic construct
  source 1..20: mol_type = other DNA
cttctgaattcctgacccct

SEQ ID NO: 3958 - DNA, 20 bp, synthetic construct
  source 1..20: mol_type = other DNA
tttacagcctgtctctgtca

SEQ ID NO: 3959 - DNA, 50 bp, synthetic construct
  source 1..50: mol_type = other DNA
ggccaggcacagtggctcatgcctatgtaatcccagcactttgggaggct

SEQ ID NO: 3960 - DNA, 50 bp, synthetic construct
  source 1..50: mol_type = other DNA
gaggcaggaagatcacttgagcctaggagttggagaccagcctgggcaac

SEQ ID NO: 3961 - DNA, 50 bp, synthetic construct
  source 1..50: mol_type = other DNA
atagggagaccctgtctctacaaaaaattagctggatgtgttggtgcatg

SEQ ID NO: 3962 - DNA, 50 bp, synthetic construct
  source 1..50: mol_type = other DNA
cctgtagtccccaccacttgtgaggctgaggtgggaggatcgcctgagcc

SEQ ID NO: 3963 - DNA, 49 bp, synthetic construct
  source 1..49: mol_type = other DNA
caggagtttgaggctactgtaagctatgattgtactactgcacttgcac

SEQ ID NO: 3964 - DNA, 50 bp, synthetic construct
  source 1..50: mol_type = other DNA
gtggctcaggcctataatcctagcacttcgggaggttgagatgggaagat

SEQ ID NO: 3965 - DNA, 50 bp, synthetic construct
  source 1..50: mol_type = other DNA
ctcttgaggctaggagttccacaccagcctcaacatagtgagactccgtc

SEQ ID NO: 3966 - DNA, 50 bp, synthetic construct
  source 1..50: mol_type = other DNA
tctacaaaaaaatttaaaaacaggcaggcgtgttggtgtgcgcttgtatt

SEQ ID NO: 3967 - DNA, 50 bp, synthetic construct
  source 1..50: mol_type = other DNA
cccagctactttggaggctcaggcaggaggactgcttcagctcacgagtt

SEQ ID NO: 3968 - DNA, 20 bp, synthetic construct
  source 1..20: mol_type = other DNA
ccaggtttcagtaagctata

SEQ ID NO: 3969 - DNA, 50 bp, synthetic construct
  source 1..50: mol_type = other DNA
ggctgggcatagtggctcacgcttataatcctagcactttgagaggccaa

SEQ ID NO: 3970 - DNA, 50 bp, synthetic construct
  source 1..50: mol_type = other DNA
ggcaggaggatcactcaagcctaggagtttgaggctagcttggacaatat

SEQ ID NO: 3971 - DNA, 50 bp, synthetic construct
  source 1..50: mol_type = other DNA
agtgagacccctgtctctacaaaaaaaaaaaaaacaccttaaaaattagc

SEQ ID NO: 3972 - DNA, 50 bp, synthetic construct
  source 1..50: mol_type = other DNA
tgggtatggtggtgcatgcacctatagtcccagttacttaggaggctgag

SEQ ID NO: 3973 - DNA, 30 bp, synthetic construct
  source 1..30: mol_type = other DNA
gtaggaggatcacttgagcctgggaggtcg

SEQ ID NO: 3974 - DNA, 50 bp, synthetic construct
  source 1..50: mol_type = other DNA
taatccctgcacttcgggaggctgaggcaggaagattgcttgagcccaag

SEQ ID NO: 3975 - DNA, 50 bp, synthetic construct
  source 1..50: mol_type = other DNA
agtttgagactagcctgggcaacatagtgagaccccatctctacaaaaaa

SEQ ID NO: 3976 - DNA, 50 bp, synthetic construct
  source 1..50: mol_type = other DNA
tttaaaaattaggcatggcagcacacgcctatagtcccagctacttggga

SEQ ID NO: 3977 - DNA, 50 bp, synthetic construct
  source 1..50: mol_type = other DNA
ggctgaggtgggaggatcacttcagcccaggaggttgaggttgcagtgag

SEQ ID NO: 3978 - DNA, 22 bp, synthetic construct
  source 1..22: mol_type = other DNA
ccatgattgcaccactgcactc

SEQ ID NO: 3979 - DNA, 50 bp, synthetic construct
  source 1..50: mol_type = other DNA
gggcatagtggctcatgcctgtaatcccagcactttgggaggccaaggca

SEQ ID NO: 3980 - DNA, 50 bp, synthetic construct
  source 1..50: mol_type = other DNA
ggaggatcacttgcgcccaggagttcgaggccaccctgggcaacatagga

SEQ ID NO: 3981 - DNA, 50 bp, synthetic construct
  source 1..50: mol_type = other DNA
ggaccccatctctgcaaaaaataaaaaattagctgggcacggtggcatgc

SEQ ID NO: 3982 - DNA, 50 bp, synthetic construct
  source 1..50: mol_type = other DNA
gcctgtaattccaacacttagagaggctgaggtaggagaatgacttgagc

SEQ ID NO: 3983 - DNA, 15 bp, synthetic construct
  source 1..15: mol_type = other DNA
ccaggaggtcaaggc

SEQ ID NO: 3984 - DNA, 50 bp, synthetic construct
  source 1..50: mol_type = other DNA
ggcacagtggctcatgcttataattccaacactttggaaggacaagggag

SEQ ID NO: 3985 - DNA, 50 bp, synthetic construct
  source 1..50: mol_type = other DNA
gaggatcacttgacaccaggaattcaagaccagactggacaacacagtga

SEQ ID NO: 3986 - DNA, 50 bp, synthetic construct
  source 1..50: mol_type = other DNA
gaccctgtctctacaaaaaatgaaattagccctgggtgtggtggcatgcg

SEQ ID NO: 3987 - DNA, 50 bp, synthetic construct
  source 1..50: mol_type = other DNA
cctgtagtcctagttacttgggaggctgataaggcaggaggatcacttga

SEQ ID NO: 3988 - DNA, 10 bp, synthetic construct
  source 1..10: mol_type = other DNA
gcccaggagc

SEQ ID NO: 3989 - DNA, 50 bp, synthetic construct
  source 1..50: mol_type = other DNA
ggctgggcacagtgactcatgcttataatcctagactttgggaggccaag

SEQ ID NO: 3990 - DNA, 50 bp, synthetic construct
  source 1..50: mol_type = other DNA
gcagaagaattgcttgagcccagaagttcaagaccagcctggggaacata

SEQ ID NO: 3991 - DNA, 50 bp, synthetic construct
  source 1..50: mol_type = other DNA
gtgagaccccatatctacaaaaaataaaaaattagctggtcatggtgaag

SEQ ID NO: 3992 - DNA, 50 bp, synthetic construct
  source 1..50: mol_type = other DNA
tgcctgtatttccagctacttgagaggctgaggcaggaggatcacttgag

SEQ ID NO: 3993 - DNA, 10 bp, synthetic construct
  source 1..10: mol_type = other DNA
cccaggagtt

SEQ ID NO: 3994 - DNA, 50 bp, synthetic construct
  source 1..50: mol_type = other DNA
ggccgggcatagtggctcgcacctgtaatctcagcacttcgggaggccga

SEQ ID NO: 3995 - DNA, 50 bp, synthetic construct
  source 1..50: mol_type = other DNA
ggcaggaggattgcttgaggccaggagtttgagaccggcatgggcaacac

SEQ ID NO: 3996 - DNA, 50 bp, synthetic construct
  source 1..50: mol_type = other DNA
agtgagaccccatctctacaatttttttttttaattagccaagcatggtg

SEQ ID NO: 3997 - DNA, 50 bp, synthetic construct
  source 1..50: mol_type = other DNA
gcacacacctgtggtaccagctactcaggaggctgaggtgggaggatcgc

SEQ ID NO: 3998 - DNA, 50 bp, synthetic construct
  source 1..50: mol_type = other DNA
ttgagcccgggaggtcgaggctgcagcaagcaatgtttgcaccactgcac

SEQ ID NO: 3999 - skipped

SEQ ID NO: 4000 - DNA, 50 bp, synthetic construct
  source 1..50: mol_type = other DNA
gccgggcatagtggctcatacctataatcctagcactttaggaagctgag

SEQ ID NO: 4001 - DNA, 50 bp, synthetic construct
  source 1..50: mol_type = other DNA
atgggtggatcacttgaggacaggagttcaagactagcctggccaacatg

SEQ ID NO: 4002 - DNA, 50 bp, synthetic construct
  source 1..50: mol_type = other DNA
gtgaaatcctgtctctacttaaaatacaaaaattagctgggcgtggtggc

SEQ ID NO: 4003 - DNA, 50 bp, synthetic construct
  source 1..50: mol_type = other DNA
acgcacctgtagtcccagctacttgggaggctgaggcaggagaattgctt

SEQ ID NO: 4004 - DNA, 49 bp, synthetic construct
  source 1..49: mol_type = other DNA
gaacccaggaggtggaggtggcagtgagccgagatcacaccactgcact

SEQ ID NO: 4005 - DNA, 50 bp, synthetic construct
  source 1..50: mol_type = other DNA
aaaccccgtttctactaaaaatacagaaaattagccaggcatggtggcac

SEQ ID NO: 4006 - DNA, 50 bp, synthetic construct
  source 1..50: mol_type = other DNA
acgcctgtagtcccagctactcgagaggctgaggcaggagaattgctgga

SEQ ID NO: 4007 - DNA, 50 bp, synthetic construct
  source 1..50: mol_type = other DNA
acctgggaggcggaggttgcagtgagccgagattgcaccactgcactcca

SEQ ID NO: 4008 - DNA, 50 bp, synthetic construct
  source 1..50: mol_type = other DNA
gcctgggcgacagagtgagactccgtctcaaaaaaaaaaaaaaaaaaaaa

SEQ ID NO: 4009 - DNA, 50 bp, synthetic construct
  source 1..50: mol_type = other DNA
ggccaggtgcagtggctcaagcctgtaatcccagcactttgggaggccga

SEQ ID NO: 4010 - DNA, 50 bp, synthetic construct
  source 1..50: mol_type = other DNA
ggcgggcggatcacaaggtcaggagatcgagaccatcctagctaacatgg

SEQ ID NO: 4011 - DNA, 50 bp, synthetic construct
  source 1..50: mol_type = other DNA
tgaaaccccatctctactaaaaatacaaaaaattagccaggcgtggtggc

SEQ ID NO: 4012 - DNA, 50 bp, synthetic construct
  source 1..50: mol_type = other DNA
gggcacctgtagtcccagctattcgggaagctgaggcaggagaatggcat

SEQ ID NO: 4013 - DNA, 50 bp, synthetic construct
  source 1..50: mol_type = other DNA
gaacccaggaggcggagcttgcagtgagccaagatagcgccactgcagtc

SEQ ID NO: 4014 - DNA, 50 bp, synthetic construct
  source 1..50: mol_type = other DNA
cagcctgggtgacagagcgagactctgtctcaaaaaaaaaaaaaaaatag

SEQ ID NO: 4015 - DNA, 10 bp, synthetic construct
  source 1..10: mol_type = other DNA
aaaaaaaaaa

SEQ ID NO: 4016 - DNA, 50 bp, synthetic construct; identical to SEQ ID NO: 1798
  source 1..50: mol_type = other DNA

SEQ ID NO: 4017 - DNA, 50 bp, synthetic construct; identical to SEQ ID NO: 1799
  source 1..50: mol_type = other DNA

SEQ ID NO: 4018 - DNA, 50 bp, synthetic construct; identical to SEQ ID NO: 1800
  source 1..50: mol_type = other DNA

SEQ ID NO: 4019 - DNA, 50 bp, synthetic construct
  source 1..50: mol_type = other DNA
tgtgaagttatgcaggttgtcactacagaagtgcacccagctgaggaggt

SEQ ID NO: 4020 - DNA, 50 bp, synthetic construct
  source 1..50: mol_type = other DNA
taaaaagtctgggctttgttagtggagggtttgtgcctgtcgcatcctgt

SEQ ID NO: 4021 - DNA, 36 bp, synthetic construct
  source 1..36: mol_type = other DNA
tctctgagcctcagtttccttatctgcaaaagaggg

SEQ ID NO: 4022 - DNA, 50 bp, synthetic construct; identical to SEQ ID NO: 3493
  source 1..50: mol_type = other DNA

SEQ ID NO: 4023 - DNA, 50 bp, synthetic construct; identical to SEQ ID NO: 3494
  source 1..50: mol_type = other DNA

SEQ ID NO: 4024 - DNA, 50 bp, synthetic construct; identical to SEQ ID NO: 3495
  source 1..50: mol_type = other DNA

SEQ ID NO: 4025 - DNA, 49 bp, synthetic construct; identical to SEQ ID NO: 3496
  source 1..49: mol_type = other DNA

SEQ ID NO: 4026 - DNA, 50 bp, synthetic construct; identical to SEQ ID NO: 3497
  source 1..50: mol_type = other DNA

SEQ ID NO: 4027 - DNA, 24 bp, synthetic construct
  source 1..24: mol_type = other DNA
ggcactcaataaatgttaactgtt

SEQ ID NO: 4028 - DNA, 50 bp, synthetic construct; identical to SEQ ID NO: 3517
  source 1..50: mol_type = other DNA

SEQ ID NO: 4029 - DNA, 50 bp, synthetic construct; identical to SEQ ID NO: 3518
  source 1..50: mol_type = other DNA

SEQ ID NO: 4030 - DNA, 16 bp, synthetic construct
  source 1..16: mol_type = other DNA
agtgggagagaaacta

SEQ ID NO: 4031 - DNA, 46 bp, synthetic construct; identical to SEQ ID NO: 3520
  source 1..46: mol_type = other DNA

SEQ ID NO: 4032 - DNA, 295 bp, synthetic construct
  source 1..295: mol_type = other DNA
ggctgggcgcggtggctcatgcctataatccccgcactttgggaggccgaggcaggtggatcatgaggtcaggagatcgagaccatcctggccaacatagtggaatcccatctctaataaaaatacaaaaattagctgagtgtggtggcgcacacctgtagtcccagctactcaggaggctgaggcaggagaatggcttgaacccgggaggtggagattgcagtgagccgagatcacgccattgcactccagtctgggctacagagcaagacttcatctgaaaaaaaaaaaaaaa

SEQ ID NO: 4033 - DNA, 295 bp, synthetic construct; identical to SEQ ID NO: 4032
  source 1..295: mol_type = other DNA

SEQ ID NO: 4034 - DNA, 30 bp, synthetic construct; identical to SEQ ID NO: 3473
  source 1..30: mol_type = other DNA

SEQ ID NO: 4035 - DNA, 30 bp, synthetic construct; identical to SEQ ID NO: 3473
  source 1..30: mol_type = other DNA

SEQ ID NO: 4036 - DNA, 30 bp, synthetic construct; identical to SEQ ID NO: 3473
  source 1..30: mol_type = other DNA

SEQ ID NO: 4037 - DNA, 30 bp, synthetic construct; identical to SEQ ID NO: 3476
  source 1..30: mol_type = other DNA

SEQ ID NO: 4038 - DNA, 30 bp, synthetic construct; identical to SEQ ID NO: 3477
  source 1..30: mol_type = other DNA

SEQ ID NO: 4039 - DNA, 295 bp, synthetic construct; identical to SEQ ID NO: 3478
  source 1..295: mol_type = other DNA

SEQ ID NO: 4040 - DNA, 303 bp, synthetic construct; identical to SEQ ID NO: 3479
  source 1..303: mol_type = other DNA

SEQ ID NO: 4041 - DNA, 32 bp, synthetic construct; identical to SEQ ID NO: 3480
  source 1..32: mol_type = other DNA

SEQ ID NO: 4042 - DNA, 29 bp, synthetic construct
  source 1..29: mol_type = other DNA
gccctccagcttcattgcctaccactctc

SEQ ID NO: 4043 - DNA, 47 bp, synthetic construct; identical to SEQ ID NO: 3489
  source 1..47: mol_type = other DNA

SEQ ID NO: 4044 - DNA, 26 bp, synthetic construct
  source 1..26: mol_type = other DNA
taatcccggcactttgggaggccaag

SEQ ID NO: 4045 - DNA, 50 bp, synthetic construct; identical to SEQ ID NO: 3486
  source 1..50: mol_type = other DNA

SEQ ID NO: 4046 - DNA, 40 bp, synthetic construct; identical to SEQ ID NO: 3492
  source 1..40: mol_type = other DNA

SEQ ID NO: 4047 - DNA, 50 bp, synthetic construct; identical to SEQ ID NO: 3493
  source 1..50: mol_type = other DNA

SEQ ID NO: 4048 - DNA, 50 bp, synthetic construct; identical to SEQ ID NO: 3494
  source 1..50: mol_type = other DNA

SEQ ID NO: 4049 - DNA, 50 bp, synthetic construct; identical to SEQ ID NO: 3495
  source 1..50: mol_type = other DNA

SEQ ID NO: 4050 - DNA, 50 bp, synthetic construct; identical to SEQ ID NO: 3502
  source 1..50: mol_type = other DNA

SEQ ID NO: 4051 - DNA, 50 bp, synthetic construct; identical to SEQ ID NO: 3503
  source 1..50: mol_type = other DNA

SEQ ID NO: 4052 - DNA, 50 bp, synthetic construct; identical to SEQ ID NO: 3504
  source 1..50: mol_type = other DNA

SEQ ID NO: 4053 - DNA, 50 bp, synthetic construct; identical to SEQ ID NO: 3505
  source 1..50: mol_type = other DNA

SEQ ID NO: 4054 - DNA, 50 bp, synthetic construct; identical to SEQ ID NO: 3506
  source 1..50: mol_type = other DNA

SEQ ID NO: 4055 - DNA, 50 bp, synthetic construct; identical to SEQ ID NO: 3507
  source 1..50: mol_type = other DNA

SEQ ID NO: 4056 - DNA, 50 bp, synthetic construct; identical to SEQ ID NO: 3508
  source 1..50: mol_type = other DNA

SEQ ID NO: 4057 - DNA, 21 bp, synthetic construct
  source 1..21: mol_type = other DNA
taatttcataaagaacaaagt

SEQ ID NO: 4058 - DNA, 23 bp, synthetic construct
  source 1..23: mol_type = other DNA
atttcatcctaaaaatgtaatag

SEQ ID NO: 4059 - DNA, 20 bp, synthetic construct
  source 1..20: mol_type = other DNA
aaccccattacagtggtccc

SEQ ID NO: 4060 - DNA, 22 bp, synthetic construct
  source 1..22: mol_type = other DNA
ctcctctcacttcctgtttcat

SEQ ID NO: 4061 - DNA, 50 bp, synthetic construct; identical to SEQ ID NO: 3513
  source 1..50: mol_type = other DNA

SEQ ID NO: 4062 - DNA, 30 bp, synthetic construct; identical to SEQ ID NO: 3514
  source 1..30: mol_type = other DNA

SEQ ID NO: 4063 - DNA, 30 bp, synthetic construct; identical to SEQ ID NO: 3515
  source 1..30: mol_type = other DNA

SEQ ID NO: 4064 - DNA, 30 bp, synthetic construct; identical to SEQ ID NO: 3516
  source 1..30: mol_type = other DNA

SEQ ID NO: 4065 - DNA, 40 bp, synthetic construct; identical to SEQ ID NO: 3521
  source 1..40: mol_type = other DNA

SEQ ID NO: 4066 - DNA, 50 bp, synthetic construct; identical to SEQ ID NO: 3522
  source 1..50: mol_type = other DNA

SEQ ID NO: 4067 - DNA, 30 bp, synthetic construct; identical to SEQ ID NO: 3523
  source 1..30: mol_type = other DNA

SEQ ID NO: 4068 - DNA, 36 bp, synthetic construct; identical to SEQ ID NO: 3524
  source 1..36: mol_type = other DNA

SEQ ID NO: 4069 - DNA, 50 bp, synthetic construct; identical to SEQ ID NO: 3525
  source 1..50: mol_type = other DNA

SEQ ID NO: 4070 - DNA, 50 bp, synthetic construct; identical to SEQ ID NO: 3526
  source 1..50: mol_type = other DNA

SEQ ID NO: 4071 - DNA, 50 bp, synthetic construct; identical to SEQ ID NO: 3527
  source 1..50: mol_type = other DNA

SEQ ID NO: 4072 - DNA, 50 bp, synthetic construct; identical to SEQ ID NO: 3528
  source 1..50: mol_type = other DNA

SEQ ID NO: 4073 - DNA, 50 bp, synthetic construct; identical to SEQ ID NO: 3529
  source 1..50: mol_type = other DNA

SEQ ID NO: 4074 - DNA, 20 bp, synthetic construct
  source 1..20: mol_type = other DNA
ctccagaatccagtctgaat

SEQ ID NO: 4075 - DNA, 46 bp, synthetic construct; identical to SEQ ID NO: 3531
  source 1..46: mol_type = other DNA

SEQ ID NO: 4076 - DNA, 30 bp, synthetic construct; identical to SEQ ID NO: 3532
  source 1..30: mol_type = other DNA
